(19) United States
(12) Patent Application Publication
(10) Pub. No.: US 2005/0282157 A1
(43) Pub. Date: Dec. 22, 2005

(54) Diagnosis of diseases associated with dna replication

(76) Inventors: Alexander Olek, Berlin (DE); Kurt Berlin, Stahnsdorf (DE)

Correspondence Address: DAVIDSON, DAVIDSON & KAPPEL, LLC, 485 SEVENTH AVENUE, 14TH FLOOR, NEW YORK, NY, 10018, US

(21) Appl. No.: 10/240,708

(22) PCT Filed: Apr. 6, 2001
(86) PCT No.: PCT/EP01/03971

§ 371 Date: May 6, 2003

(30) Foreign Application Priority Data
Apr. 6, 2000 (DE) 100190588
Apr. 7, 2000 (DE) 100191738
Jun. 30, 2000 (DE) 100325297
Sep. 1, 2000 (DE) 100438261

(51) Int. Cl. C12Q 1/68; C07H 21/04; C12P 19/34; C12M 1/34

(52) U.S. Cl. 435/6; 435/91.2; 435/287.2; 536/23.1

(57) ABSTRACT

Chemically modified genomic sequences of genes associated with DNA replication, to oligonucleotides and/or PNA-oligomers for detecting the cytosine methylation state of genes associated with DNA replication which are directed against the sequence are disclosed. In addition, a method for ascertaining genetic and/or epigenetic parameters of genes associated with DNA replication is disclosed.

### FIELD OF THE INVENTION

[0001] The levels of observation that have been well studied by the methodological developments of recent years in molecular biology, are the genes themselves, the translation of these genes into RNA, and the resulting proteins. The question of which gene is switched on at which point in the course of the development of an individual, and how the activation and inhibition of specific genes in specific cells and tissues are controlled is correlatable to the degree and character of the methylation of the genes or of the genome. In this respect, pathogenic conditions may manifest themselves in a changed methylation pattern of individual genes or of the genome.

[0002] The present invention relates to nucleic acids, oligonucleotides, PNA-oligomers and to a method for the diagnosis and/or therapy of diseases which have a connection with the genetic and/or epigenetic parameters of genes associated with DNA replication and, in particular, with the methylation status thereof.

### PRIOR ART

[0003] The replication of double stranded genomic DNA is a complex activity. It is carried out in three key stages, initiation, elongation and termination. Each stage involves specific protein and enzyme complexes. During initiation, the double helix is temporarily separated and stabilized into two single strands, each of which acts as a template for the replication of the DNA from the replication fork. Separation of the two strands is carried out by a helicase, and stabilisation of the strands is achieved using a single stranded binding protein. Replication of the DNA is then carried out by a polymerase after synthesis of a short ‘primer’ sequence. Replication is carried out in a semi-discontinuous fashion. The leading strand is continuously synthesised in the 5′ to 3′ direction. Whereas replication of the lagging strand, in the 3′ to 5′ direction is made by the synthesis of short fragments in the 5′ to 3′ direction. In the final stage, replication is terminated, and the lagging strand complementary DNA fragments are ligated into a continuous strand.

[0004] A further overview of the components of the DNA replication system is available from references such as Alberts et. al. ‘Molecular Biology of the cell’ Garland Publishing.

[0005] Disruptions to the ordered replication of DNA may impact on a wide variety of disease phenotypes. These range from chromosomal disorders to disorders at a molecular level. Malfunctions in the specific genes involved in DNA replication have been implicated in several disease phenotypes, including, but not limited to cancer:
[0006] Ataxia-telangiectasia; Meyn MS. ‘Ataxia-telangiectasia, cancer and the pathobiology of the ATM gene’. Clin Genet. 1999 May; 55(5):289-304.
[0007] ATR-X; Wada T. ‘Molecular genetic study of japanese patients with X-linked alpha-thalassemia/mental retardation syndrome’. Am J Med Genet. 2000 Sep. 18; 94(3):242-8.
[0008] Bloom's syndrome; German J. ‘Bloom's syndrome’. Dermatol Clin. 1995 January; 13(1):7-18.
[0009] Cancer; Sturgis et. al. ‘XPD/ERCC2 polymorphisms and risk of head and neck cancer: a case-control analysis.’ Carcinogenesis. 2000 December; 21(12):2219-23.
[0010] Neurological disorders; Hermon et. al. ‘Expression of DNA excision-repair-cross-complementing proteins p80 and p89 in brain of patients with Down Syndrome and Alzheimer's disease.’ Neurosci Lett. 1998 Jul. 17; 251(1):45-8.

[0011] The diversity of components involved in DNA replication provides an alternative target for therapies and diagnosis for diseases. In particular this may be relevant to diseases where current therapies may have unwanted side effects or fail to provide effective treatment. For cancer patients such methods constitute a considerable advantage over conventional methods such as chemotherapy, which with their massive side effects, sometimes result in unacceptable morbidity or lead up to the death of the patient. In practice, the unwanted side effects associated with cancer therapies frequently limit the treatment which could help a patient.

[0012] A global analysis of the status of DNA replication mechanisms would provide a basis for the development of appropriate and specific therapies for diseases associated with DNA replication. The current state of the art is such that the analysis may be carried out in a gene specific manner based on the results of gene expression, e.g. DNA micro array analysis of mRNA expression or proteomic analysis. The next step would then be to look at the causal factors involved at earlier stages in the regulatory mechanisms controlling DNA replication. DNA methylation provides such a novel level of information at which to analyse the genome.

[0013] 5-methylcytosine is the most frequent covalent base modification in the DNA of eukaryotic cells. It plays a role, for example, in the regulation of the transcription, in genetic imprinting, and in tumorigenesis. Therefore, the identification of 5-methylcytosine as a component of genetic information is of considerable interest. However, 5-methylcytosine positions cannot be identified by sequencing since 5-methylcytosine has the same base pairing behaviour as cytosine. Moreover, the epigenetic information carried by 5-methylcytosine is completely lost during PCR amplification. A relatively new and currently the most frequently used method for analyzing DNA for 5-methylcytosine is based upon the specific reaction of bisulfite with cytosine which, upon subsequent alkaline hydrolysis, is converted to uracil which corresponds to thymidine in its base pairing behavior. However, 5-methylcytosine remains unmodified under these conditions. Consequently, the original DNA is converted in such a manner that methylcytosine, which originally could not be distinguished from cytosine by its hybridization behavior, can now be detected as the only remaining cytosine using “normal” molecular biological techniques, for example, by amplification and hybridization or sequencing. All of these techniques are based on base pairing which can now be fully exploited. In terms of sensitivity, the prior art is defined by a method which encloses the DNA to be analyzed in an agarose matrix, thus preventing the diffusion and renaturation of the DNA (bisulfite only reacts with single-stranded DNA), and which replaces all precipitation and purification steps with fast dialysis (Olek A, Oswald J, Walter J. A modified and improved method for bisulphite based cytosine methylation analysis. Nucleic Acids Res. 1996 Dec. 15; 24(24):5064-6). Using this method, it is possible to analyze individual cells, which illustrates the potential of the method. However, currently only individual regions of a length of up to approximately 3000 base pairs are analyzed, a global analysis of cells for thousands of possible methylation events is not possible. However, this method cannot reliably analyze very small fragments from small sample quantities either. These are lost through the matrix in spite of the diffusion protection.

[0014] An overview of the further known methods of detecting 5-methylcytosine may be gathered from the following review article: Rein, T., DePamphilis, M. L., Zorbas, H., Nucleic Acids Res. 1998, 26, 2255.

[0015] To date, barring few exceptions (e.g., Zeschnigk M, Lich C, Buiting K, Doerfler W, Horsthemke B. A single-tube PCR test for the diagnosis of Angelman and Prader-Willi syndrome based on allelic methylation differences at the SNRPN locus. Eur J Hum Genet. 1997 March-April; 5(2):94-8) the bisulfite technique is only used in research. Always, however, short, specific fragments of a known gene are amplified subsequent to a bisulfite treatment and either completely sequenced (Olek A, Walter J. The pre-implantation ontogeny of the H19 methylation imprint. Nat Genet. 1997 November; 17(3):275-6) or individual cytosine positions are detected by a primer extension reaction (Gonzalgo M L, Jones P A. Rapid quantitation of methylation differences at specific sites using methylation-sensitive single nucleotide primer extension (Ms-SNuPE). Nucleic Acids Res. 1997 Jun. 15; 25(12):2529-31, WO 95/00669) or by enzymatic digestion (Xiong Z, Laird P W. COBRA: a sensitive and quantitative DNA methylation assay. Nucleic Acids Res. 1997 Jun. 15; 25(12):2532-4). In addition, detection by hybridization has also been described (Olek et al., WO 99/28498).

[0016] Further publications dealing with the use of the bisulfite technique for methylation detection in individual genes are: Grigg G, Clark S. Sequencing 5-methylcytosine residues in genomic DNA. Bioessays. 1994 June; 16(6):431-6, 431; Zeschnigk M, Schmitz B, Dittrich B, Buiting K, Horsthemke B, Doerfler W. Imprinted segments in the human genome: different DNA methylation patterns in the Prader-Willi/Angelman syndrome region as determined by the genomic sequencing method. Hum Mol Genet. 1997 March; 6(3):387-95; Feil R, Charlton J, Bird A P, Walter J, Reik W. Methylation analysis on individual chromosomes: improved protocol for bisulphite genomic sequencing. Nucleic Acids Res. 1994 Feb. 25; 22(4):695-6; Martin V, Ribieras S, Song-Wang X, Rio M C, Dante R. Genomic sequencing indicates a correlation between DNA hypomethylation in the 5′ region of the pS2 gene and its expression in human breast cancer cell lines. Gene. 1995 May 19; 157(1-2):2614; WO 97/46705, WO 95/15373 and WO 97/45560.

[0017] An overview of the Prior Art in oligomer array manufacturing can be gathered from a special edition of Nature Genetics (Nature Genetics Supplement, Volume 21, January 1999), published in January 1999, and from the literature cited therein.

[0018] Fluorescently labelled probes are often used for the scanning of immobilised DNA arrays. The simple attachment of Cy3 and Cy5 dyes to the 5′-OH of the specific probe are particularly suitable for fluorescence labels. The detection of the fluorescence of the hybridized probes may be carried out, for example via a confocal microscope. Cy3 and Cy5 dyes, besides many others, are commercially available.

[0019] Matrix Assisted Laser Desorption Ionization Mass Spectrometry (MALDI-TOF) is a very efficient development for the analysis of biomolecules (Karas M, Hillenkamp F. Laser desorption ionization of proteins with molecular masses exceeding 10,000 daltons. Anal Chem. 1988 Oct. 15; 60(20):2299-301). An analyte is embedded in a light-absorbing matrix. The matrix is evaporated by a short laser pulse thus transporting the analyte molecule into the vapor phase in an unfragmented manner. The analyte is ionized by collisions with matrix molecules. An applied voltage accelerates the ions into a field-free flight tube. Due to their different masses, the ions are accelerated at different rates. Smaller ions reach the detector sooner than bigger ones.

[0020] MALDI-TOF spectrometry is excellently suited to the analysis of peptides and proteins. The analysis of nucleic acids is somewhat more difficult (Gut I G, Beck S. DNA and Matrix Assisted Laser Desorption Ionization Mass Spectrometry. Current Innovations and Future Trends. 1995, 1; 147-57). The sensitivity to nucleic acids is approximately 100 times worse than to peptides and decreases disproportionally with increasing fragment size. For nucleic acids having a multiply negatively charged backbone, the ionization process via the matrix is considerably less efficient. In MALDI-TOF spectrometry, the selection of the matrix plays an eminently important role. For the desorption of peptides, several very efficient matrixes have been found which produce a very fine crystallization. There are now several responsive matrixes for DNA, however, the difference in sensitivity has not been reduced. The difference in sensitivity can be reduced by chemically modifying the DNA in such a manner that it becomes more similar to a peptide. Phosphorothioate nucleic acids in which the usual phosphates of the backbone are substituted with thiophosphates can be converted into a charge-neutral DNA using simple alkylation chemistry (Gut I G, Beck S. A procedure for selective DNA alkylation and detection by mass spectrometry. Nucleic Acids Res. 1995 Apr. 25; 23(8):1367-73). The coupling of a charge tag to this modified DNA results in an increase in sensitivity to the same level as that found for peptides. A further advantage of charge tagging is the increased stability of the analysis against impurities which make the detection of unmodified substrates considerably more difficult.

[0021] Genomic DNA is obtained from DNA of cell, tissue or other test samples using standard methods. This standard methodology is found in references such as Fritsch and Maniatis eds., Molecular Cloning: A Laboratory Manual, 1989.

### Description

[0022] The object of the present invention is to provide the chemically modified DNA of genes associated with DNA replication, as well as oligonucleotides and/or PNA-oligomers for detecting cytosine methylations, as well as a method which is particularly suitable for the diagnosis and/or therapy of genetic and epigenetic parameters of genes associated with DNA replication. The present invention is based on the discovery that genetic and epigenetic parameters and, in particular, the cytosine methylation pattern of genes associated with DNA replication are particularly suitable for the diagnosis and/or therapy of diseases associated with DNA replication.

[0023] This objective is achieved according to the present invention using a nucleic acid containing a sequence of at least 18 bases in length of the chemically pretreated DNA of genes associated with DNA replication according to one of Seq. ID No. 1 through Seq. ID No. 94 and sequences complementary thereto and/or a sequence of a chemically pretreated DNA of genes according to table 1 and sequences complementary thereto. In the table, after the listed gene designations, the respective data bank numbers (accession numbers) are specified which define the appertaining gene sequences as unique. GenBank was used as the underlying data bank, which is located at the National Institute of Health, internet address www.ncbi.nlm.nih.gov.

[0024] The chemically modified nucleic acid could heretofore not be connected with the ascertainment of genetic and epigenetic parameters.

[0025] The object of the present invention is further achieved by an oligonucleotide or oligomer for detecting the cytosine methylation state in chemically pretreated DNA, containing at least one base sequence having a length of at least 13 nucleotides which hybridizes to a chemically pretreated DNA of genes associated with DNA replication according to Seq. ID No. 1 through Seq. ID No. 94 and sequences complementary thereto and/or a sequence of a chemically pretreated DNA of genes according to table 1 and sequences complementary thereto. The oligomer probes according to the present invention constitute important and effective tools which, for the first time, make it possible to ascertain the genetic and epigenetic parameters of genes associated with DNA replication. The base sequence of the oligomers preferably contains at least one CpG dinucleotide. The probes may also exist in the form of a PNA (peptide nucleic acid) which has particularly preferred pairing properties. Particularly preferred are oligonucleotides according to the present invention in which the cytosine of the CpG dinucleotide is the 5^{th}-9^{th} nucleotide from the 5′-end of the 13-mer; in the case of PNA-oligomers, it is preferred for the cytosine of the CpG dinucleotide to be the 4^{th}-6^{th} nucleotide from the 5′-end of the 9-mer.

[0026] The oligomers according to the present invention are normally used in so called “sets” which contain at least one oligomer for each of the CpG dinucleotides of the sequences of Seq. ID No. 1 through Seq. ID No. 94 and sequences complementary thereto and/or a sequence of a chemically pretreated DNA of genes according to table 1 and sequences complementary thereto. Preferred is a set which contains at least one oligomer for each of the CpG dinucleotides from one of Seq. ID No. 1 through Seq. ID No. 94 and sequences complementary thereto and/or a sequence of a chemically pretreated DNA of genes according to table 1 and sequences complementary thereto.

[0027] Moreover, the present invention makes available a set of at least two oligonucleotides which can be used as so-called “primer oligonucleotides” for amplifying DNA sequences of one of Seq. ID No. 1 through Seq. ID No. 94 and sequences complementary thereto and/or a sequence of a chemically pretreated DNA of genes according to table 1 and sequences complementary thereto, or segments thereof.

[0028] In the case of the sets of oligonucleotides according to the present invention, it is preferred that at least one oligonucleotide is bound to a solid phase.

[0029] The present invention moreover relates to a set of at least 10 n (oligonucleotides and/or PNA-oligomers) used for detecting the cytosine methylation state in chemically pretreated genomic DNA (Seq. ID No. 1 through Seq. ID No. 94 and sequences complementary thereto and/or a sequence of a chemically pretreated DNA of genes according to table 1 and sequences complementary thereto). These probes enable diagnosis and/or therapy of genetic and epigenetic parameters of genes associated with DNA replication. The set of oligomers may also be used for detecting single nucleotide polymorphisms (SNPs) in the chemically pretreated DNA of genes associated with DNA replication according to one of Seq. ID No. 1 through Seq. ID No. 94 and sequences complementary thereto and/or a sequence of a chemically pretreated DNA of genes according to table 1 and sequences complementary thereto.

[0030] According to the present invention, it is preferred that an arrangement of different oligonucleotides and/or PNA-oligomers (a so-called “array”) made available by the present invention is present in a manner that it is likewise bound to a solid phase. This array of different oligonucleotide- and/or PNA-oligomer sequences can be characterized in that it is arranged on the solid phase in the form of a rectangular or hexagonal lattice. The solid phase surface is preferably composed of silicon, glass, polystyrene, aluminium, steel, iron, copper, nickel, silver, or gold. However, nitrocellulose as well as plastics such as nylon which can exist in the form of pellets or also as resin matrices are possible as well.

[0031] Therefore, a further subject matter of the present invention is a method for manufacturing an array fixed to a carrier material for analysis in connection with diseases associated with DNA replication in which method at least one oligomer according to the present invention is coupled to a solid phase. Methods for manufacturing such arrays are known, for example, from U.S. Pat. No. 5,744,305 by means of solid-phase chemistry and photolabile protecting groups.

[0032] A further subject matter of the present invention relates to a DNA chip for the analysis of diseases associated with DNA replication which contains at least one nucleic acid according to the present invention. DNA chips are known, for example, for U.S. Pat. No. 5,837,832.

[0033] Moreover, a subject matter of the present invention is a kit which may be composed, for example, of a bisulfite-containing reagent, a set of primer oligonucleotides containing at least two oligonucleotides whose sequences in each case correspond or are complementary to an 18 base long segment of the base sequences specified in the appendix (Seq. ID No. 1 through Seq. ID No. 94 and sequences complementary thereto and/or a sequence of a chemically pretreated DNA of genes according to table 1 and sequences complementary thereto), oligonucleotides and/or PNA-oligomers as well as instructions for carrying out and evaluating the described method. However, a kit along the lines of the present invention can also contain only part of the aforementioned components.

[0034] The present invention also makes available a method for ascertaining genetic and/or epigenetic parameters of genes associated with the cycle cell by analyzing cytosine methylations and single nucleotide polymorphisms, including the following steps:

[0035] In the first step of the method, a genomic DNA sample is chemically treated in such a manner that cytosine bases which are unmethylated at the 5′-position are converted to uracil, thymine, or another base which is dissimilar to cytosine in terms of hybridization behavior. This will be understood as ‘chemical pretreatment’ hereinafter.

[0036] The genomic DNA to be analyzed is preferably obtained form usual sources of DNA such as cells or cell components, for example, cell lines, biopsies, blood, sputum, stool, urine, cerebral-spinal fluid, tissue embedded in paraffin such as tissue from eyes, intestine, kidney, brain, heart, prostate, lung, breast or liver, histologic object slides, or combinations thereof.

[0037] The above described treatment of genomic DNA is preferably carried out with bisulfite (hydrogen sulfite, disulfite) and subsequent alkaline hydrolysis which results in a conversion of non-methylated cytosine nucleobases to uracil or to another base which is dissimilar to cytosine in terms of base pairing behaviour.

[0038] Fragments of the chemically pretreated DNA are amplified, using sets of primer oligonucleotides according to the present invention, and a, preferably heat-stable polymerase. Because of statistical and practical considerations, preferably more than ten different fragments having a length of 100-2000 base pairs are amplified. The amplification of several DNA segments can be carried out simultaneously in one and the same reaction vessel. Usually, the amplification is carried out by means of a polymerase chain reaction (PCR).

[0039] In a preferred embodiment of the method, the set of primer oligonucleotides includes at least two olignonucleotides whose sequences are each reverse complementary or identical to an at least 18 base-pair long segment of the base sequences specified in the appendix (Seq. ID No. 1 through Seq. ID No. 94 and sequences complementary thereto and/or a sequence of a chemically pretreated DNA of genes according to table 1 and sequences complementary thereto). The primer oligonucleotides are preferably characterized in that they do not contain any CpG dinucleotides.

[0040] According to the present invention, it is preferred that at least one primer oligonucleotide is bonded to a solid phase during amplification. The different oligonucleotide and/or PNA-oligomer sequences can be arranged on a plane solid phase in the form of a rectangular or hexagonal lattice, the solid phase surface preferably being composed of silicon, glass, polystyrene, aluminium, steel, iron, copper, nickel, silver, or gold, it being possible for other materials such as nitrocellulose or plastics to be used as well.

[0041] The fragments obtained by means of the amplification can carry a directly or indirectly detectable label. Preferred are labels in the form of fluorescence labels, radionuclides, or detachable molecule fragments having a typical mass which can be detected in a mass spectrometer, it being preferred that the fragments that are produced have a single positive or negative net charge for better detectability in the mass spectrometer. The detection may be carried out and visualised by means of matrix assisted laser desorption/ionization mass spectrometry (MALDI) or using electron spray mass spectrometry (ESI).

[0042] The amplificates obtained in the second step of the method are subsequently hybridized to an array or a set of oligonucleotides and/or PNA probes. In this context, the hybridization takes place in the manner described in the following. The set of probes used during the hybridization is preferably composed of at least 10 oligonucleotides or PNA-oligomers. In the process, the amplificates serve as probes which hybridize to oligonucleotides previously bonded to a solid phase. The non-hybridized fragments are subsequently removed. Said oligonucleotides contain at least one base sequence having a length of 13 nucleotides which is reverse complementary or identical to a segment of the base sequences specified in the appendix, the segment containing at least one CpG dinucleotide. The cytosine of the CpG dinucleotide is the 5^{th} to 9^{th} nucleotide from the 5′-end of the 13-mer. One oligonucleotide exists for each CpG dinucleotide. Said PNA-oligomers contain at least one base sequence having a length of 9 nucleotides which is reverse complementary or identical to a segment of the base sequences specified in the appendix, the segment containing at least one CpG dinucleotide. The cytosine of the CpG dinucleotide is the 4^{th} to 6^{th nucleotide seen from the} 5′-end of the 9-mer. One oligonucleotide exists for each CpG dinucleotide.

[0043] In the fourth step of the method, the non-hybridized amplificates are removed.

[0044] In the final step of the method, the hybridized amplificates are detected. In this context, it is preferred that labels attached to the amplificates are identifiable at each position of the solid phase at which an oligonucleotide sequence is located.

[0045] According to the present invention, it is preferred that the labels of the amplificates are fluorescence labels, radionuclides, or detachable molecule fragments having a typical mass which can be detected in a mass spectrometer. The mass spectrometer is preferred for the detection of the amplificates, fragments of the amplificates or of probes which are complementary to the amplificates, it being possible for the detection to be carried out and visualized by means of matrix assisted laser desorption/ionization mass spectrometry (MALDI) or using electron spray mass spectrometry (ESI).

[0046] The produced fragments may have a single positive or negative net charge for better detectability in the mass spectrometer. The aforementioned method is preferably used for ascertaining genetic and/or epigenetic parameters of genes associated with DNA replication.

[0047] The oligomers according to the present invention or arrays thereof as well as a kit according to the present invention are intended to be used for the diagnosis and/or therapy of diseases associated with DNA replication by analyzing methylation patterns of genes associated with DNA replication. According to the present invention, the method is preferably used for the diagnosis and/or therapy of important genetic and/or epigenetic parameters within genes associated with DNA replication.

[0048] The method according to the present invention is used, for example, for the diagnosis and/or therapy of Ataxia telangiectasia, ATR-X, Bloom's syndrome, neurological disorders, solid tumors and cancer.

[0049] The nucleic acids according to the present invention of Seq. ID No. 1 through Seq. ID No. 94 and sequences complementary thereto and/or a sequence of a chemically pretreated DNA of genes according to table 1 and sequences complementary thereto can be used for the diagnosis and/or therapy of genetic and/or epigenetic parameters of genes associated with DNA replication. The present invention moreover relates to a method for manufacturing a diagnostic agent and/or therapeutic agent for the diagnosis and/or therapy of diseases associated with DNA replication by analyzing methylation patterns of genes associated with DNA replication, the diagnostic agent and/or therapeutic agent being characterized in that at least one nucleic acid according to the present invention is used for manufacturing it, possibly together with suitable additives and auxiliary agents.

[0050] A further subject matter of the present invention relates to a diagnostic agent and/or therapeutic agent for diseases associated with DNA replication by analyzing methylation patterns of genes associated with DNA replication, the diagnostic agent and/or therapeutic agent containing at least one nucleic acid according to the present invention, possibly together with suitable additives and auxiliary agents.

[0051] The present invention moreover relates to the diagnosis and/or prognosis of events which are disadvantageous to patients or individuals in which important genetic and/or epigenetic parameters within genes associated with DNA replication said parameters obtained by means of the present invention may be compared to another set of genetic and/or epigenetic parameters, the differences serving as the basis for a diagnosis and/or prognosis of events which are disadvantageous to patients or individuals.

[0052] In the context of the present invention the term “hybridization” is to be understood as a bond of an oligonucleotide to a completely complementary sequence along the lines of the Watson-Crick base pairings in the sample DNA, forming a duplex structure. To be understood by “stringent hybridization conditions” are those conditions in which a hybridization is carried out at 60° C. in 2.5×SSC buffer, followed by several washing steps at 37° C. in a low buffer concentration, and remains stable.

[0053] The term “functional variants” denotes all DNA sequences which are complementary to a DNA sequence, and which hybridize to the reference sequence under stringent conditions and have an activity similar to the corresponding polypeptide according to the present invention.

[0054] In the context of the present invention, “genetic parameters” are mutations and polymorphisms of genes associated with DNA replication and sequences further required for their regulation. To be designated as mutations are, in particular, insertions, deletions, point mutations, inversions and polymorphisms and, particularly preferred, SNPs (single nucleotide polymorphisms).

[0055] In the context of the present invention, “epigenetic parameters” are, in particular, cytosine methylations and further chemical modifications of DNA bases of genes associated with DNA replication and sequences further required for their regulation. Further epigenetic parameters include, for example, the acetylation of histones which, however, cannot be directly analyzed using the described method but which, in turn, correlates with the DNA methylation.

[0056] In the following, the present invention will be explained in greater detail on the basis of the sequences and examples with reference to the accompanying FIGURE without being limited thereto.

[0057] FIG. 1

[0058] FIG. 1 shows the hybridisation of fluorescent labelled amplificates to a surface bound olignonucleotide. Sample I being from an oligodendroglyome grade II tumour sample and sample II being from astrocytoma grade II cerebrum tissue. Flourescence at a spot shows hybridisation of the amplificate to the olignonucleotide. Hybridisation to a CG olignonucleotide denotes methylation at the cytosine position being analysed, hybridisation to a TG olignonucleotide denotes no methylation at the cytosine position being analysed.

Seq ID Nos. 1 to 94

[0059] Sequences having odd sequence numbers (e.g., Seq. ID No. 1, 3, 5, . . . ) exhibit in each case sequences of the chemically pretreated genomic DNAs of different genes associated with DNA replication. Sequences having even sequence numbers (e.g., Seq. ID No. 2, 4, 6, . . . ) exhibit in each case the sequences of the chemically pretreated genomic DNAs of genes associated with DNA replication which are complementary to the preceeding sequences (e.g., the complementary sequence to Seq. ID No. 1 is Seq. ID No. 2, the complementary sequence to Seq. ID No. 3 is Seq. ID No. 4, etc.)

Seq ID Nos. 95 to 98

[0060] Seq ID Nos. 95 to 98 show the sequences of oligonucleotides used in Example 1.

[0061] The following example relates to a fragment of a gene associated with DNA replication, in this case, MLH1 in which a specific CG-position is analyzed for its methylation status.

### EXAMPLE 1

### Methylation Analysis in the Gene MLH1 Associated with DNA Replication

[0062] The following example relates to a fragment of the gene MLH1 in which a specific CG-position is to be analyzed for methylation.

[0063] In the first step, a genomic sequence is treated using bisulfite (hydrogen sulfite, disulfite) in such a manner that all cytosines which are not methylated at the 5-position of the base are modified in such a manner that a different base is substituted with regard to the base pairing behavior while the cytosines methylated at the 5-position remain unchanged.

[0064] If bisulfite solution is used for the reaction, then an addition takes place at the non-methylated cytosine bases. Moreover, a denaturating reagent or solvent as well as a radical interceptor must be present. A subsequent alkaline hydrolysis then gives rise to the conversion of nonmethylated cytosine nucleobases to uracil. The chemically converted DNA (sequence ID 31) is then used for the detection of methylated cytosines. In the second method step, the treated DNA sample is diluted with water or an aqueous solution. Preferably, the DNA is subsequently desulfonated (10-30 min, 90-100° C.) at an alkaline pH value. In the third step of the method, the DNA sample is amplified in a polymerase chain reaction, preferably using a heat-resistant DNA polymerase. In the present case, cytosines of the gene MLH1 are analyzed. To this end, a defined fragment having a length of 866 bp is amplified with the specific primer oligonucleotides TTTAAGGTAAGAGAATAGGT (Sequence ID No. 95) and AAACAACTTAAATACCAATC (Sequence ID No. 96). This amplificate serves as a sample which hybridizes to an oligonucleotide previously bonded to a solid phase, forming a duplex structure, for example GGTTTGTACGAGTAGTTT (Sequence ID No. 97), the cytosine to be detected being located at position 135 of the amplificate. The detection of the hybridization product is based on Cy3 and Cy5 fluorescently labeled primer oligonucleotides which have been used for the amplification. A hybridization reaction of the amplified DNA with the oligonucleotide takes place only if a methylated cytosine was present at this location in the bisulfite-treated DNA. Thus, the methylation status of the specific cytosine to be analyzed is inferred from the hybridization product.

[0065] In order to verify the methylation status of the position, a sample of the amplificate is further hybridized to another oligonucleotide previously bonded to a solid phase. Said olignonucleotide is identical to the oligonucleotide previously used to analyze the methylation status of the sample, with the exception of the position in question. At the position to be analysed said oligonucleotide comprises a thymine base as opposed to a cytosine base i.e GGTTTGTATGAGTAGTTT (Sequence ID No. 98). Therefore, the hybridisation reaction only takes place if an unmethylated cytosine was present at the position to be analysed. The procedure was carried out on cell samples from 2 patients, sample I being from an oligodendroglyome grade II tumour sample and sample II being from a astrocytoma grade II cerebrum tumor sample.

[0066] From the results (FIG. 1) it can be seen that the sample I contained contained only unmethylated cells at position 135 of the amplificate whereas sample II contained a mixture of methylated and unmethylated cells at position 135 of the amplificate.

### EXAMPLE 2

### Diagnosis of Diseases Associated with DNA Replication

[0067] In order to relate the methylation patterns to one of the diseases associated with DNA replication, it is initially required to analyze the DNA methylation patterns of a group of diseased and of a group of healthy patients. These analyses are carried out, for example, analogously to Example 1. The results obtained in this manner are stored in a database and the CpG dinucleotides which are methylated differently between the two groups are identified. This can be carried out by determining individual CpG methylation rates as can be done, for example, in a relatively imprecise manner, by sequencing or else, in a very precise manner, by a methylation-sensitive “primer extension reaction”. It is also possible for the entire methylation status to be analyzed simultaneously, and for the patterns to be compared, for example, by clustering analyses which can be carried out, for example, by a computer.

[0068] Subsequently, it is possible to allocate the examined patients to a specific therapy group and to treat these patients selectively with an individualized therapy.

[0069] Example 2 can be carried out, for example, for the following diseases:

[0070] Ataxia telangiectasia, ATR-X, Bloom's syndrome, neurological disorders, solid tumours and cancer

TABLE 1
Listing of particularly preferred genes of the present invention
associated with the DNA replication

| | Database Entry No. (Genbank, internet |
|---|---|
| Gene | address www.ncbi.nlm.nih.gov) |
| CENPB | X05299 |
| DNA2L | D42046 |
| ATR | NM_001184 |
| CHD1L | NM_004284 |
| ERCC3 | NM_000122 |
| SNRPA1 | NM_003090 |
| RAD50 | NM_005732 |
| LIG2 | |

The application's sequence listing, which the Patent Office published only in electronic form, follows.

SEQUENCE LISTING (98 sequences)

SEQ ID NO: 1 - DNA, 10467 bp, Artificial Sequence
  chemically treated genomic DNA (Homo sapiens)
ttttaattttttgttaatagtatgtagagttttttttagtgaatttgttttttttttattttaattatgtatttgggtggggttaatataatttttagatttttggtgggttatggtaggtttaagataattagagtattttattattttagttaacggatgggtatagggtttaaattaggttaatgggagtaagtgaattttagagtttagggtttgagttagagtaattagaaaagattttttattttaggagggtgaggtgttgtttgattaggagttgttgtaatttttttgtttgatgaggggagagggaggagttgatagagggttattatgtggaatatgaggatgaagattattaaaggtagaggggagaggagagaaatggggatattatgtggtataataagaaatatattttgggtttttgttttttgtttttggtatagagtttttaaattttatgggattttttggatgataggatttattttttgttataatgaggtgatttttgttgggtttttggatagttttaaaattggagttggttattagaaagattaagttttgattagaaatttggaatttttagtttagttaatatggtgaaattttatttttattaaaattataaaaattagtcgggtatggtggtgtatgtttgtaattttagttagttaggaggttaaagtaaaagaattgtttgaatttaggaggcgaaggatgtagtgagttaaggtcgtattattgtattttagtttgggtaatagagcgaggttttattttaaaaaaaaaaaaaaaaaattgattatgtttatgtgatgaaatttttataaaaatttttagataaaagagtttagagaatttttaggttggtgaatatatttatgtgttaagagggtggtatattttagtttaatgggatagaagtttttgtgtttgggatttttttgggttttgttttatatgtttttttttttggttattaatttatattttttaaaataaatttataaatataagtaaaatatgtttttgagttttgtgagttattttagaaaattgttgaatttgaggagggagttgtgagaatttttaatttatagttagttagttaggagtatgagaggttaggatttgtgattggtatttgaagtggagggtagattttgagttttttatttacggggttcgtgttaattttagatagttagtgttataattgaattgaattgttgaacgtttgtttttttttggagatttagagaattggtcgttgatgttggagaatatttttttttggtaatatttttggagttattgaattttttaattatttgaattagtaattttgttttatattgtaattatttggagatgaattttttgttatatttaatataaagagttttggtggagaagaattaattttttgggtatatattaaattttttagaggagtgattagaatgagaattaaagagaaatgttattttaatagttttgatatttaaaaagtttaaaatataaaaattaagtaggataataagaaaatgtggaatgttaaaattgattttagagtgtattttgattattaagttagtagagtgatggagaaagaaagaattatagtaagagattttgttaaatgaattaatgtggtttgggggaaaaaaaaaaaaaagattaaagtagaaaatgatttattagttaggaaggggtgatgagtggaataaaagtgatttaagattttagtatatgtttttatttattttttgttgttataatagaatatttgagattgggtaatttataatgaataaaaatttattggtatatagttttggagattaggaagtttaagattgaggggttagtattttttaagggttttttttttttattattttatagatggaagatggaagagtaagagagagtataagagtgaatttgtagttttaagtttttttaatagttggtattattttagttatgagagttttgttataataatttaaaatattttcgtagatttattttttaatattattgtattgggggttaggtttttatatatgtttttggggagatatatttagatcgtagtagtattgtttggaaggaaggtaaatattgataattttagagtttgattatttaaattataattaataatataattaaaatagagtttataatttttaaattagtagagtttgaaaaatagagaaaaaaaattaatttaaaagaaggttagaaaggatgggaaaatacgtaaaagaataaattggaaggatgaaataaaatggtataaatatatttaaatatttcgataatcgtaatgaaagttatggattttaggtaaaagaaaaagattgttagattaaatgttttaaattatttaaataaatgttatttataagaaatatatttaaagtatagtataaagaaaaattgaaagtgtgaatttttaaaagatttaagtatattttaattaaaaaaatatgggtatagttaataaatattgggcggtagggggaggttttaatgtaaaaagtattgagttttttaagaaaagataataatttaaagtatatagaatatatttaataatatggttttaaaatatataaagtaaatatttatagaattataataaaatagataaatttataattatagtaggaaaatttaatatatttttttgaggaagtagttgattaagtagataaaataaaaatttaaaaagatatagaaaaattgaatgatataattaaatttgtaggatatattttttttttgtatattgaatattaatgaaatttgattatataatggatattaaagtaagtttaatatatttttttttttttgagatagagttttgttttgtcgtttaggttggagtgtagtggcgcgatttcggtttattgaaagttgcgttttatcggtttacgttatttttgttttagtttttcgagtagttgggattataggcgtttattattacgttcggttaattttttgtattttttagtggagatagggttttattatgttagttaggatggttttaattttttgatttcgtgatttttttttttcggatttttaaagtgttgggattataggtgtgggttatcgtgtcggttaagtttaattttcgaggagatgatttgataattttagaggtagatatatgaataagaagtatatgataattgtgattattgaggtatttattttttttagtagattagttaaaggatggcgtttttatttgtgttatattttgggtgtttaatatagtatttgttatataattaggtgtttagtaaagttttgttaaatgatcgaatggggcgtttttagcgtagtgtgtaagtgttttattaggggtaggcgtttagtaattcgagaagtatggagtaggaaattataaatagtatttgtttttttttttttttttttatttgttgtggggaaggttttttttgtaaatttgaaaggttgatttacgggaagtcgtggaggaggtgtatgttaggttaacgaatagaatgtgtaaaggtttagaaggaagatagagtttagtttgtaagggaatgttaatttggagtgattaatattatgaaagggtattagttggagatattgttataaagggattgttttgtaattttataagtatgggggtaaaattaagattaaatatagggaaagaatatttttataggtgaggatggtgttgaattttagaataatcgttttttagatattttgaataaaaatttagtagttagagaagtttgattatgaagtaaatttgatttttgtttttttagataataaaagttatttttttgaaagtaatggtgtaatttgaatgagtgtagagaagcgttgaagattgagttttattaaagtttttagatttggatttggtagtagcgtggttttagttaagtttcggtttttatatttgtaaagtgggaataatgtttattttggagggttgttgtgaagattaagggagataatatatgtaaagtatttaattatttgtttggtggggtagtttttatgatttagattttaaattgtttattgttgttgttgttatttttggtattttttattggttggtatttgtttgtttaagtttataatatagtaggagtattaataaggttttacggtggggattttggtcgtttgacgagatttgcgttttcgtttatttttttttttttttttttatattggagacgcggttattatcgcgttggcgcggagagagggaggatcgggcgttatgttgtttttggtttgaggttttgtgtgtttttgttttttttttgttttattcgtgtatttttgtttacggtttgtgcggggaattaggagtttagtattgaaacggcggtttttttaaatagtatcggacgggcgcgggggttgacgtttgtaattttaatattttgggaggtcgaggtgggcggattttttgaagtcgggagttcgagattattttggttaacgtggtgaaattttgtttttattaaaaatataaaaaaaaaaaaaaaaaaaaagttaggagtgatggcgttcgtttgtaattttagttatttcgtaggttgaggtaggagaatcgtttgaattcggggggtagaggttgtagtgagtcgagattgcgttattgtattttagtttgggtaaaaagagcgagatttcgttttaaaaaaaaaaaaaaaagtatttttcgtagtttttatgtagcggaggggttcgatttgtaatcggtttgaaattaagcgtggcgtaagatttgtttaagtttttttttttggttaaatttttcggaggggaaggtttttcgaggaaacgaaagcgaaattgaatcggagttattttgggttcggcgcgtagattcgcggagtttttcgtgtcgacgtttcggggttatttttagtgcggagtagcggaggcgtgggggtttcgaggggttggcgcggtttagcggtcgggttagggtcgtgtcgtcggcgggtcgggtcgggtaatgtttcgcgggcgtaatgaattcgcggtaggtaagtcgggtcggttttggattttcgtcgtcgtttgggttcgtttataattttataggttttgtgttgtagtgcgtagcgtgtgcgttttgtgagtgttagagtgtgtgtgtgtgtgtcgttttgttaagtagtattgttggtttaggaatttgtgcgttttgtgagtgtgtgtgtgtgggtgtgtgtcgttttgttaagtagtattgttggtttaggaatttgtgcgttttgtgagagtgtgtgtgtgtgtgtgtgcgtgtgtgtgtagttttgttaagtagtattgttggtttaggaatttgtgaatttgtattttgtttattaattttgtagaatggagtagtgcgtgaagagggtttgggggaaaatgcgttttcgtttgagtaggaaggtttgagtttatgttaaggtagatatatcgtttttttttttgttagggttttttgtggaattttttattttcgttttagttttatttgaataacgttcggattttgagtagcgtatattatttttagtttattttatttattttttgaaggttttttgggagttaaaaatggtatttaagttgtaggagaaagtttgttaattattttatagttaaaaattgggaaaatataaatggtttttagtaggttaatagataaattgaaatatatttatataatgggatattgtttagtagtgaagaggaaatattgttataagtaataatacgggtgattcgtaagtgcgttatgttaagtacgagaagttagatttaaaaggttgtatattgtatgagtttatttatatgatattttggaaaaaaaaaattatagttatagggatggaaagtggattcgtgggtgttagggattgggtatcgtggaagaaattgattgttgagtggtatgaaaaagttttttagggaaatagaaatgttttatattttgattgtggtggcgattgtcgaaatttatagatttatatatttaaaaggataaattttattgtatttaaattatatattttaattttgttaagatatatatatatttttttttttttaagtatttttttgaaaggattaaggacgtttaatttgaaggaaaagtatttttgtataggtgttagtgtattgtattgtggaatttgtgtggtaaaggtaaagggggtagtgtttattttttgattttaaatatgtgagattagattaaagtgaaatttgggaggtaatgaatgttaaatgagttgttatgtaatttgtatagaggtgatgttgagagatttagaaaggattattgtgggttgtttgtttatttttttgtttttttatttcgtagttttttaaatggttgtatttaacggtggtttggtgtttaggggatttaaggggggtaaaaagaaagattaataatttttttttttttttttaattttattgttttaagatatttttagtaaatttatatttttttttttttttttgtgtttattttattgtgcgtatatatatatatttatggattttttttttttgtttagggaaaaaaattataatgtatatattattttataattttttgttgttttattgaatattatatgatttttaaattatttttaggtgaatataaatagatatgatatattttaaaaaaataaaataattggtcgggcgtggtagtttatgtttgtaattttagtattttgggaggtcgaggagggcggattaggagatcgatattattttggttagtatggtgaaattttatttttattaaaaatataaaaattagttgggtgtggtggcgtgcgtttgtaattttagttatttcggaggttgaggtaggagaattatttgaattcgggaggcggagattgtagtgagttgagattatattgtattttagtttgattgtagtgagtcgagattatgttattgtattttagtttggtaatagagcgagatttcgttttataagaaaaaaaataatcgtgtgagtattattttatagaatgaatgttttataatttaatttttttatagatagatattaaaatattttttagatttgggttaagagtagtagtttaaaaaatatttagtttttaattgattttagttattttgaaatataattttttttttttaaggttatttaaagagttaataggagaatttttaagttttataatttagttttgggagttagtatttattttgtatatatatttgtttttgtttttagtaatatggtgggcgtgagggtgtagtaagaggaataagaaagaaatgattgtttgtatagtggcgttttgtttatgtagttattaatttaataaatgtttgttgagaattagttttgtgttaagtgttagagaggttgagatgattgaagtatagtttttgatttttaagagtttattatggaattaattgaagttttttattagtattgtgttgggaatattgagagtggagagttgagtataatttataggatatttaatgttaattattttttagatattgtaatgtgtgtgtgttataaaaaaaaaaaaaatttagtagttttgatacgagggaaagtaaatggtttaataggtgttgagtaggagaagtttaaggagaggaaattttaagggttgaagaaggtgggagttaggagttttttgaagtaagtggtatttaaggagttttataaggaaagggttagagttgtgataggtggttgtggagggagatgtgttatttggattggtatgtagagggatagaaagattataggtttttgtaatggtttagtaagaggtaatgaggggttggaattggaagaaaatatatttaagatatagtatagaggtggtagataaggtgggatttggtaattatttgatgagatttaggagatgaggttaggaggcgggtagtaaagatgacgtaggtttttagttttaataggttaggaggagagtgatgttattagtaataagaattataggagaaggagttgagtttgagggaattattaatttggtttagaatatgtgttgtttgagttatggtaggatatttaagtggatagattgtcgatatagttggaaatttagattttaagtttttatataaggtagtggttggatatagtagatttgagtgtttttgttttagagggttagtttaggttggggtagtgattaaagtaatttaggaaataaattataaaggaagaagaggtttttaaaattttggagattgattatataaagggtggattcgttaatatagtagttattaaaaaattataaggggtgggaaaaagggataaagaagaaaaaagaggtgaaagatttttgttgtgttattaaattttgggaggagaattttttaaaagaagagtatttaatttatagtgaattaaggtatgtttgttaaatataattgattattatatagcgaagatttaaatgaggtttaagagaaggaatttttatggattttgttagtataagttaaggtttttttttagtattattgggaagttttggagaagaaaagggggatagtgggttttgggtggagaagggaattgattatgagatttaggtggggtgaggaggtgtgtgaagttagagtggggaagaattagggtggtttattggtagttttatcggggttatgcgaggagtaggttttattagagtaaggagtgaagttgtagaaatatagggaagttattattagaaaagagtaggagttaagaaattatggtttataggtataaattatttgtttttataaataaagttttatggtaaatgaattgtaaataaagttttgtatattgtgtgaggttgtttttgtgttatagtggtagagttgtttggttttttatagaaaaagtttattagttattggaaaaaatttgtaagatttgaggttttggtgtgatggtttaggttagagttatagtgagattgaaggagtagttagataagttaattgtgtggtagaaggtagggatggagattattgggttaaggatttttgtagttaggatattatgagagtgattgataagaatgttgaaattttttaagtgtgttaggatgtggaagagtagaaggttagagttatggaagaaagggttttatttttatttgtgtagtttttaggagagtttgaggagggggcggtgagtgtgagtaaatgttgttagaatttttttttttagtttataagttttagggaaaggaagtaaggtgtttattgatatttttaggtttataagtattttttggttttattattttttagtgaatagttttggggagaagatagtattggtttgtaggtgggtgggtggggaaaggggttataggtgtttggtgttttggtaaatgtgtatatgagaatatggggttgtttgtgttttgttcgttagggtttagaagaacgtgtagtggaagtagttatggggaagtagttagggaaggtaggattggtttgaggtggtgaggagtagatgttgttagttttatatatttaggagagtttgggtggtttgggtaaaagtttttggtattttttttgagtttgggtattatattgaagagtgaggatagtgtgttatttttattaggaaattttttagttttttgaagattaaattttgatttttttgggatggtagtgaagagttatagagatgattttgaggtttcgtggtttttttttatttggagattgttttcgttattgcgttgttatagttttggaggattggggtttagttttatttaattatatttttttttttgttatagttatttaaacgatagattttagagataggtgggtaaggggtgtattggtgagtttgatttaaggagaggttatttcgttttttttttagttttattttttttggttattgttattttatgtgattgttttggttattttaggttattttgtttttgtttttaaaataataatatatatttgttgttttgattttaaaggggtaattgttttggtaattagaaaattatttttttaatttttttaaattttgttaaagggaaaagtaagttaggttgttggagaggttatgttgaggttttagaatttttgtatttttggaagttttgcgtgttttgttttttgtttttttttttgtgtttttgttggtaggtttttaggtaggatttaggaggtaggtaagttattttagttaagttataagtttatggtttaattgtttttttagttttttaagggttgttttataggtagtaaagggaggggtttttataggtttattattgtagttttaatttattttttttttttattgttttattttgtagg

SEQ ID NO: 2 - DNA, 10467 bp, Artificial Sequence
  chemically treated genomic DNA (Homo sapiens)
tttgtagaataagatagtggaaaaagaaaatgaattagggttgtagtggtgaatttgtggaggtttttttttttgttgtttgtggaatagtttttgaagggttgagaaggtaattgagttatgggtttatgatttggttagggtgatttgtttattttttaaattttgtttaggggtttgttaataggaatatagagaggggagtaggaggtaaagtacgtagaatttttaggaatatagaggttttgaggttttagtatagtttttttagtaatttaatttatttttttttttgatagaatttaagggagttgagaaggtaattttttagttattaaaataattatttttttaaaattagaataataaatatatgttattgttttgaaaataaaaatagaataatttgaaataattagaataattatatgaaataataataattaagggagatgggattagggaagggacgagatgatttttttttaagttaggtttattagtgtattttttgtttatttgtttttaagatttatcgtttagatgattatgataaaagaagaaatgtgattggatgaaattgaattttagttttttaaggttgtaatagcgtagtaacgaaaataatttttaggtgggaaaaggttacgggattttagagttatttttgtggttttttattgttattttaggaggattagaatttggtttttagggagttggagggttttttgataaaaatggtatattgtttttattttttagtgtggtatttaggtttagaagggatgttagagatttttgtttaaattatttaggtttttttggatgtgtggagttggtagtatttgttttttattattttagattagttttattttttttagttatttttttatagttgtttttattgtacgtttttttgaattttgacggatagggtataagtaattttatgtttttatatgtatatttattagaatattaagtatttgtgatttttttttttatttatttatttgtaaattagtattgttttttttttagggttgtttattggagggtgatggagttaggaagtatttataagtttgggggtgttagtaaatattttgttttttttttttggggtttgtagattgggaggagggattttgataatatttatttatatttatcgttttttttttagatttttttggaggttgtataggtagaggtgggatttttttttttataattttagttttttatttttttatattttgatatatttaggggattttagtatttttgttaattatttttatggtgttttggttataaggatttttaatttagtgatttttatttttattttttgttatataattggtttgtttagttatttttttaattttattatgattttaatttaggttattatattaagattttaaattttgtaagttttttttagtggttgataaattttttttataaagggttagatagttttgttattgtagtataaaaatagttttatataatatgtaaaattttatttataatttatttattatgaagttttatttataaaaataggtagtttgtatttgtgggttatagttttttgatttttgtttttttttgatggtgatttttttgtgtttttataattttattttttattttggtggaatttgtttttcgtatgatttcggtgaagttgttagtaagttattttgatttttttttattttgattttatatatttttttattttatttggattttatggttagtttttttttttatttaaggtttattgtttttttttttttttttaaagttttttagtggtattggagaaggattttgatttgtgttaatagggtttataaaaatttttttttttgaattttatttgggttttcgttgtgtggtggttaattgtgtttaataaatatgttttagtttattgtggattgagtattttttttttaaaaaattttttttttagggtttggtgatatagtaaaggttttttatttttttttttttttttgttttttttttttattttttataattttttaatagttattgtattaacggatttattttttatataattagtttttaaggttttaaggattttttttttttttataatttattttttaggttgttttaattattgttttaatttaaattagttttttgaagtaagagtatttaaatttattatgtttagttattattttgtgtgggagtttaagatttgaatttttaattatgtcgatagtttgtttatttaaatattttgttataatttaaatagtatatattttgaattaaattaatagtttttttaaatttagtttttttttttgtagtttttattgttaatggtattattttttttttagtttattaaggttagaaatttgcgttatttttgttgttcgttttttggttttattttttggattttattaggtagttgttaagttttattttgtttgttatttttgtattgtgttttaaatgtgtttttttttagttttagttttttattattttttattgggttattgtaaaggtttataatttttttatttttttatatgttaatttaggtggtatatttttttttatagttatttattataattttgattttttttttatagagttttttaaatgttatttgttttaggagatttttgatttttattttttttagtttttggggttttttttttttgagttttttttatttagtatttgttaaattatttattttttttcgtattagagttattggattttttttttttttatggtatatatatattgtagtgtttgaaaggtaattaatattaggtgttttataagttatatttaattttttatttttaatatttttaatatagtattgatgaggggttttagttgattttatggtgagtttttgggggttaaggattatgttttaattattttaatttttttagtatttggtataaagttgatttttaataaatatttgttgaattaatgattgtatgaataagacgttattatgtaagtaattattttttttttgttttttttgttgtatttttacgtttattatattgttagggatagaggtaaatgtgtgtatagagtgagtgttggtttttagagttgaattatgggatttaggggtttttttattagttttttgagtgattttgggaaaaaaaaattgtgttttaaagtggttagagttagttaaaagttaaatgttttttaaattgttatttttggtttaaatttggaaaatattttaatgtttgtttatagaagaattaaattatgaaatatttattttatggaatagtatttatacggttatttttttttttgtgagacggagtttcgttttgttgttaagttggagtgtagtggtatgatttcggtttattgtaattaggttggagtgtagtgtgattttagtttattgtaattttcgtttttcgggtttaagtgatttttttgttttagttttcggagtagttgggattataggcgtacgttattatatttagttaatttttgtatttttagtagagatggggttttattatgttggttaggatggtgtcgattttttgattcgtttttttcggttttttaaagtgttgggattataggtatgagttattacgttcggttagttattttatttttttaaaatgtgttatatttatttgtatttatttggggataatttaggaattatataatgtttaataaaataataaaaagttgtagaatagtatgtatattataatttttttttttaaataaaaagagaaaatttatgaatgtgtatgtgtgcgtataatggaatgaatatagagaaaagaaaggagatgtaagtttgttaaggatattttagggtagtagggttagagggagaggaggagattattaatttttttttttgttttttttaaattttttaaatattaagttatcgttgagtatagttatttggaaagttacggaataggagagtaagaaagtgagtaagtaatttatagtgattttttttaaattttttagtattatttttatgtaaattatataataatttatttaatatttattgttttttagattttattttaatttggttttatatatttaggattaagagataagtattattttttttgtttttattatataggttttatagtgtaatatattgatatttgtgtagaaatgttttttttttaagttaggcgtttttaatttttttaaaggagtgtttaaaaaaaaaaaaatatatatatattttaataaaattgaggtatataatttagatatagtaaaatttatttttttaagtgtataaatttatgaatttcgataatcgttattataattaagatatagaatatttttatttttttaaaaagtttttttatgttatttaataattaattttttttacgatatttagtttttggtatttacggatttattttttatttttataattgtggttttttttttttagaatgttatataaatggatttatatagtatgtagttttttgagtttggtttttcgtgtttagtataacgtatttgcgagttattcgtgttgttatttgtaatagtattttttttttattattaagtagtattttattatgtggatgtattttagtttatttgttaatttgttgaaggttatttgtgtttttttagtttttagttataaagtggttaataagtttttttttatagtttaagtgttatttttaatttttagaaggtttttaggaggtggataaggtgagttgaggatagtgtgcgttgtttaaagttcgaacgttgtttaagtggggttaaagcgggggtagggggttttataaggggttttagtagaaagggagacgatgtgtttgttttgatatgggtttaggtttttttatttagacgggggcgtatttttttttaagttttttttacgtattgttttattttgtagaattaatgagtaggatataaatttataaatttttaaattagtaatgttgtttggtaagattatatatatacgtatatatatatatatatatttttataagacgtataaatttttaaattagtaatgttgtttggtaagacgatatatatttatatatatatatttataagacgtataaatttttaaattagtaatgttgtttggtaagacgatatatatatatatattttaatatttataagacgtatacgttacgtattgtaatataaagtttgtgaggttgtaaacgaatttagacggcggcgaaggtttaaggtcggttcggtttatttgtcgcggatttattgcgttcgcgaggtattgttcggttcgattcgtcggcggtacgattttggttcgatcgttgggtcgcgttagtttttcgaggtttttacgttttcgttatttcgtattggaagtggtttcggggcgtcggtacgggaaatttcgcgggtttgcgcgtcgggtttaagatggtttcggtttaatttcgttttcgttttttcggaaagttttttttttcggaaagtttggttaagaggaggggtttgagtaaattttgcgttacgtttggttttaggtcggttataagtcgaattttttcgttgtatgagaattacggaaggtatttttttttttttttttgaggcggagtttcgttttttttgtttaggttggagtgtaatggcgtaatttcggtttattgtaatttttgtttttcgggtttaagcgatttttttgttttagtttacggagtagttgggattataggcgagcgttattatttttggttttttttttttttttttttttgtatttttagtaagaatagggttttattacgttagttagggtggtttcgaattttcggttttaagagattcgtttatttcggttttttaaagtgttgggattataggcgttagttttcgcgttcgttcggtattgtttaggaaaatcgtcgttttagtattgagtttttaatttttcgtataggtcgtaggtaggaatatacgaatagagtaaaaggaaaataaaggtatataaaattttaggttagaaatagtatgacgttcggtttttttttttttcgcgttagcgcggtggtggtcgcgtttttaatgtggaggggggggggaggggatgggcgggagcgtagatttcgttaaacgattaaggtttttatcgtgggattttgttaatgtttttattatgttataaatttaagtaagtagatgttagttagtaaaaagtattaagagtagtaatagtagtagtgaataatttaggatttaggttataaaaattattttattaggtaaatggttaagtattttatatgtattattttttttaatttttataatagttttttaaggtaggtattatttttattttgtaggtgtagaaatcgaggtttgattaaggttacgttgttgttaaatttaggtttgaaggttttagtaaagtttagtttttagcgtttttttatatttatttaaattatattattatttttaaaaagataatttttgttatttagagggataaaagttaaatttgttttatggttaggtttttttaattgttggatttttgtttaaggtatttgggaaacgattattttagggtttaatattatttttatttgtgagaatgttttttttttgtgtttaattttaattttatttttatgtttatgaaattataaggtagtttttttatagtagtatttttagttgatgtttttttatggtgttagttattttaaattaatatttttttgtaggttgggttttgttttttttttgggtttttgtatattttattcgttggtttagtatgtattttttttacggtttttcgtgaattaattttttaaatttataagggaggttttttttatagtaggtagggggagaggagggggagtaggtgttgtttgtggttttttattttatgtttttcgagttattgggcgtttatttttaatagggtatttgtatattgcgttaaaaacgttttattcgattatttaataaaattttattaagtatttaattatgtggtagatattgtgttaagtatttaggatatgatataaataagagcgttattttttagttagtttgttagggaagatggatgttttagtaattataattattatgtattttttgtttatatatttgtttttagaattgttaagttattttttcgggggttgaatttggtcggtacggtggtttatatttgtaattttagtattttggaagttcgaggaggggggattacgaggttaggaggttgagattattttagttaatatggtgaaattttgtttttattaaaaaatataaaaaattagtcgggcgtggtggtgggcgtttgtagttttagttattcgggaggttgaggtaagaatggcgtgaatcggtgaggcgtagtttttagtgagtcgagatcgcgttattgtattttagtttgggcgatagagtaagattttgttttaaaaaaaaaaaaatgtgttgaatttgttttagtgtttattatgtggttaagttttattaatatttaatgtataaggaaaaagtgtattttatagatttgattatgttatttaatttttttatatttttttagatttttattttgtttatttgattaattatttttttagaaagatgtattaaatttttttgttatggttgtaggtttgtttgttttgttgtagttttgtaaatgtttgttttatatattttaaggttatattattaagtgtattttatatattttaaattgttatttttttttggagaatttagtgttttttatattaaagtttttttttatcgtttagtatttattagttatatttatatttttttgattaaaatatatttgaattttttaaaaatttatatttttaatttttttttatgttatgttttaaatgtgttttttgtaaatagtatttatttgaataatttaaaatatttggtttgataattttttttttttgtttggagtttataatttttattgcgattatcgaaatatttggatatatttatattattttgttttatttttttaatttgtttttttacgtgtttttttattttttttaatttttttttgaattgattttttttttttattttttaaattttattagtttgaaagttgtaggttttgttttaattatattattgattgtaatttaaatggttaaattttgaagttattaatatttattttttttttaaataatattattacggtttgaatgtgtttttttaaaagtatgtgtagaaatttaatttttaatgtaatagtgttgggaggtgggtttacggggatattttaggttattatggtaaagtttttatgattggaataatgttaattattaaaagagtttgaggttgtaagtttatttttgtgtttttttttgtttttttattttttatttatgggatgatggaggaagaaggtttttaaaagatgttgattttttaattttggattttttagtttttagaattgtgtgttaataaatttttgtttattataaattatttagttttaggtattttgttatagtagtaaaaaatagataaagatatatattaagattttaggttatttttattttatttattatttttttttgattgatagattattttttgttttagtttttttttttttttttttttaaattatattggtttatttaatagaattttttgttgtggttttttttttttttattattttgttaatttagtggttaaagtatattttaaagttaattttgatattttatatttttttgttattttatttaatttttgtgttttaaattttttaaatgttagaattattgaaatggtatttttttttaatttttattttggttatttttttgggagatttgatgtgtgtttaggaggttggtttttttttattaggattttttatgttggatatgatagaaaatttatttttaaatggttgtaatataaagtaaagttattggtttaggtaattaggagatttagtggttttaaggatattattaagggggggtgttttttaatattaacgattaattttttgagtttttagagaagaataggcgtttaataatttaatttaattgtgatattaattatttggagttagtacggatttcgtaggtgaaggatttaaagtttgttttttattttagatgttagttataagttttggttttttatatttttgattgattggttataaattaggggtttttataattttttttttaggtttaataattttttagaatggtttatagaatttaggaatatgttttatttatgtttatggatttgttttaaaggatataaattaatagttaggagaagaggtatatagggtaagatttagaagggttttaggtatagaagtttttattttattgagttggggtatgttatttttttggtatatggatgtgtttattaatttggaagttttttagatttttttgtttaagggtttttatggaggttttattatataggtatgattaattttttttttttttttttgagatagagtttcgttttgttgtttaggttagagtgtagtggtgcgattttagtttattgtatttttcgttttttgagtttaagtaatttttttgttttggttttttgattagttgggattataggtatgtattattatgttcggttaatttttgtagttttagtagagatggggttttattatgttagttaggttgaaggttttaggtttttaattagagtttggtttttttggtgattagttttaattttggagttatttaggagtttagtaagagttattttattataataagaagtgggttttattatttaggaaattttatgggatttaggagttttgtgttaggaataagggataaagatttaaaatatattttttattatgttatataatgtttttatttttttttttttttttttgtttttggtggtttttatttttatgttttatatggtggttttttgttaatttttttttttttttttattaaataaaagggttgtagtagtttttgattaagtagtattttatttttttggggtagagggttttttttggttgttttggtttaagttttgggttttggggtttatttgtttttattggtttgatttgggttttgtgtttattcgttggttagggtgatgaggtattttgattgttttaagtttgttatggtttattagaggtttggaagttgtattaattttatttaagtgtatagttgggatgggagaagggtaaatttattaaagaaaattttgtatgttgttggtagagaattgggg

SEQ ID NO: 3 - DNA, 10619 bp, Artificial Sequence
  chemically treated genomic DNA (Homo sapiens)
gttttatttgtttaataggaaatttttggtgtggggttttagatattttttttattttattattatatatatatatattagtagttagaattgtgtgtttttttttttttttttttttttttttgatatagagttttggtttgtcgattaggttggagtgtagtggtgtaatttcggtttattgtaatttttgttttttaagattaagggatttttttgttttagttttttgagtagtttggattataggtatgtattattatgtttagttaattgttttgtatttttagtagagatagggttttatcgtgttagttaggttggttttaaatttttgattttgtgattcgtttgttttggttttttaaagtgttgggattataggtacgagttattattttttttttttatttttgattaattttgataaaatataaaattaaattaagataaattaattttgtaaaataaagataaagttggaggttttatattttttgattttaaaatttattatgatgtggcgttggaataaagataaatatatagattaatggaatagaatagagagtttaaaaataaatttttaatatatatggttaaatgattttaataagggtgttaagattatttagtgggaaaaggatagttttttttatagatggtggatttttatatgtagaagaatgtagttggatttatattttatattaaatgtttgttgtgagtttatttatttttttgtgtgtgtggagatagggtcgtgttatgttgtttaggttgatttagaattttttatttagagatattgttaaggtaagtgagggttaagtggatattgagtgattttgtgttttattgagtaaaaataattaaatatgggcgaaggagagtttaatgattttagggataaaatgttattacgggtattttgcgtacgtttgttaggatataggagaagtaattagatattttatttatttttttagaatgtttattaatatgtttagaaaggtggaaaattttatttgttaaagagaaggaaattggaggtatggttaaaagtatttaaggttttttatgaaaaagaaatgaaaattgatattttttttaaaagagaagtaaaatagaaatttagagattttaatgtattcgaaaggttttttttgggtttttattttgtgttttgagtattgtttttaaattaaaggagatttcggtttgtttattggtagtgatgttaagaatttgggagggatatgagtgattatgttgtagatggtaagtagtttaaaaagaaggttttttaattgaaggaaaagtattaagagtagaatgttgtatatttagttaaaggaaagttgatgtggtaaaaatgatgttgttaaggtcgaaaaaggtaagaaaaaaaaataaagcggagaaagatagagaaggtaaggaaaataaaaaatgaagtcgatgataatgataaataaggtggttttatggtagtttttttttttttttttttgtttataaagtatttaatttatttggatatagtttattttttttaaagaaaaaaattgaaatgtaaagttatttaagatttatttgtaaattgtatgatggcgttttttttttgtttttgtattattaataagaattattaagtaattttttagataattttgttttggtggtattttgtatagttattaattttgtttggtatattataggggttataaattagtatgggaattttaaatttaaggtatagtataagttagttatatataaatgtgaagtaatattattaattaaattgttggtttgtgcgaagggagggttaattgtgggatttagttatttatttaataaatattggtgagtgtttgatattgttttaggtattgaggttattgtaataaaatagatataagtttttgtttttatggagtttatattttggtgagggatatagagttattaaaaaggatggtagttgggttatgagaaaggattaaagttaggaagttagaattcggggatggattgaatatgggataaaagagaagagttaagttgattataaagtatttggtttaagtaatgtaaagaatggtgggttattttttgagatgggaagtattagggtagttttggatataaatggagatgtatataagttatttaaattgaaatattgagaaggtagtaggtgatagttggttttttttaggttttagggtaggaatttttaattttttgtgtgtgtgtttaggatttttttggtggtttatgaagttttttttagaataaatattgtggaggaatttattttaatgtaatagtagtttttaggtatattattaggtaaattattttataagttataaaatagaaagttttatagattaaattatgatgtttgaattgtaggtttattgaattagtttaaaattatttatagtaagaattcgatggggtgtatgatatatataggatagggtataggcgaggtagatggattatattattagaatttagaattagggaattttttttttttttttttttttttttttttttgagattgttttattatgttgtttaggttggagtgtaatggcgtgatttcggtttattgtaatttttattttttgggtttaagcgatttttatgttttagtttttcgagtagttgggattataggtacgtattataatgtttagttaatttttgtatttttagtagagacggggttttattatgttgattaggttggttttgaatttttgattttaggtgatttattcgttttagatttttaaagcgttgggattataggtatgagttattgtatttggttaatattgatatgttttttttttttttgtcgtattagtttgttttattgatagagttgaggatgtttaaggcggtttaatagagggtatttggagtaatttatattgtattattagagagatataagtgtaagtatatttagttatagttgtagtttattaattagtttgttgaatagatttgaattttagttgtatttttggggtagagtatatgggtgttaggatgggattataattttattattaatgagtggttatttagggatgatatagttgttaatttagagatggtatgattatgttttttgatttggttattttttaagtaaaatttttatttgttttattatattttttatttattttgtttatttttaaaatattttttttttttttttgagatagggttatattgttatttaggttagagtttagtggtattattatggtttattatagttttaatttttagggtttaggtgatttttttattttagtttttcgagtagatgggattataggtatttgttattatttttagttaatttttgtagagataaggttttgttatgttgtttaggttggttttgaatttttgggtttaagggattcggttattttagttttttaaagtgttaggattataggtatgagttattgtgtttagtttatttttaacgtatttaattggttattaatttttaggattcggtttatgttttataatttttttgtttatttaatatttttgttttttaagttattagttttttttttatggttaatattttttatgagttttatttatttgtttattttttttattttttatattagaattgaatatttttaaataaagtatatttatgttataatttttgaaatgaaaaaaaaaatgtataggattagaaaagaaattaattttaataaattatattttgaagtatagttttatattaaataataagatttaggttaggtgtagtggtttatgtttgtaattttagtaatttgggaagtcgaggtgggaggattgtttgaggttaggggtttaagattagtttgggtaatatggagagattttttatttttttttttatatatatatatatatatatatatatatataaaatatttgatagtaataggtgttgttattattataatttcgagtagtgatgagtttaataatatttcgagttattattaataattgtaaagtaatatgaaaacgtttgtgatgattattgtttataaagttataggtattgttaatatttttggtatttgtagttaaatttataataaaggaaatgttaggttttagttggtattttgtttcgacggtttgtggacggtaggttagaacgttcgtttaagttaggagggtggatttagtattgtagggtttatttcgggttaattaattatattttcgaggcgggggttcggtttttcggatttagttgtttttaggggagagaggatatatttaagagtttggggtcggcgtggtagtatatgtttttgattttagtatttcgggaggttgaggcgtgaagattatttgtagtaggagtttgagattagtttagttaatttggcgagattttgtttttaaaaaaaatttttttttaattagttagttgtggtgagcgtttgtagttttagttattcgggaggttgaggtgggaggatcgttgggtttaggagttttagattgtagtgagttatgatggcggtattgtattttagcgcggtgagatttagttttaaaaataaaagggggaggggttgggggtaaaattagttgtgaaattaagtaagattttttgggatagaataattaaaggggtggcgtcgggttttttaaagagttattagtttagtttaagtttcgtttcggtttttaggtagcggtcgtagagttttattcggtaggcgttcgggaaatttcgtttttcggtcggtagggggcgcgcgtcgtcggtttcgtttcgtggacgcgggtttcgtgggcgttttcgcggttaggtattagtaatttattagggaacggcggtggtcggtgcggcgtgttcggtggcggttttggtcgtttaagagttgcggttgggtgagcgtacgcgaggcggcgaggcggtagcgtgtttttaggtcgtggcgtcgggttttcggagttttggcggtagttaggggaggatggcggagttttcggataagttttatcgagtcgagtacgttaagagcgggcgcgttttttgtaagaaatgtagcgagagtatttttaaggattcgtttcggatggttattatggtgtaggtgcgggttttgtgcgggcggcggggcggggacgcggcgtttcgggttaattgtgttcgggaaggttgggggagggcggttttagggagcgagcgggttcgggttcgggttttcggagcggtatttggggtttatgggttcgcggtcgttttttttttcgagcggttcggtcgattttttcggaaggttttgttgatgttgtaggaaaagttcgggaaataaagtttgtagttggtgttgtttttcgttttgtgaaaacgaggagttttttttttttttttttttgggtggcggtgttttattattgtcgttcgttttaggggttgggggggaattgtatatggtttttttaagttaatttgattttgatttattttgttttggagggtttttgttttatatggatggtggcgattgatatgtgggtttttttttttttttgttaaatttatttttggtagttattttaatacgttatttaaacgtttatttttattttttattttaattaggtagaattatgtagaaaggtgttatttttgtatagtatatttattttgagtttaatttgtgttttaaagtaatattttttttaaattttttagatttatagacgcgtttttttggtgtatttgtagttgtttggtttgagtaagagtggttttaggggggttttttatgtgggttttttgatagattgaatttttttttgaggttttttgagttttttgtgaggtggtgggtttgaaggtttttgttattttttaggggtttttgtttttagtttttagtttgtcgatgtttatttttgtattaataattttggtttttatttgttttgttttttttcgtttttaatatattatttaagtttagtgtttatggttaaggtagtttgattttttttttttttatgagttgtaatgtgttttaggaatgattagatattttttagtggatttttagtatttagtataagggagggcgatatttatcgagtggatatttaagtgttaggtgtattttcgttattttattttataatatgtttgttattttggtgttttcggggtatatttaagttagtacgtggtatatagtgtttatttggtaggtattttttaagttttaagtattttgttaggttttaaggatatagaatttatttttgggaatttttagtttggttaaacgggaaatgattggtaaataaatattatcgtaagagaggatggatgttatttgatggagttgtgttttaggtattgtgtgtttaggagttcgagatgatttagttaagggtggaagtttgattaggagtcgttaatttatagaagtggagtagaaagatgagaatagggaagtagatagggtttataatttgaagagttttgttgtttattaaggaatttagaatttattttgaatatataaggtagtttgttatgaagtttttatttttggtgtaggagtttttattttagggtttgtgggatggtaggtagaaggtaagaggtttatgagtttagataagaaaaaattgatatttttatttttattaatttttagataaaattattttttttaattataaatgtaagtagtaaagtaaaggtatattagtagtttttattttttttttattagtgataattatagatatttttatattattttatagttggaagttttttaaaatataatttatttttattgttataaaaattatagttattagaggttgtattagattttgttatttaatgtttaaaagtttacgggttattgtatttaaattattttttaaatgttttgataattattttagtgtttttttttcgagtttttttgtttgttttgttttttgagatggggttttattatgttgtttaggttggttttaaatttttgagtttaagcgatttatgtatttcggttttataaagtgttagggttataggtatgagttatcgtgattggttatttgcgagtttttttattacgtatttttaaatgttattttgagaaagggatatttaggcgttttaataggtgggtagagtatcgtgttttggtggaaagataaataaaatttaagtttagattgtgttgaggttagaataatatcgttgtggaggaagttagaggaggtttagttgtgggggaggtcggatggaggaaattgaatttgattaagtttagtattttggggtcgggtttggtggcgtatgtttgtaattttagtattttgggaggttggggtgggtagattatttaagtttagtagtttgagattagtttggttaatatggtgaaatttgtttttataaaaaaatgtaatgattagcgggtcgtggtggtgcgtgtttgttaaggtttagttatttcggaggttgaagttggaagattgtttgagtttgggaggtggaggttgtagtgagttgagatagtgttattgtattttagtttgggcgatagatttagatttagatttagattttgtttgaaaaaaaaaatagtaataataatattttgggtttttttttggtatatttgatagtgaaagaaattttttattattaaaagtaattgtgatttttatgtaatggtgattaagggtggatttagagttttaatttagaatttaaagttggtttggtagattgagttggtgaaggttaaaaagaaagaagtttttttatttgtttgaatttaaatatttttttttatatttatatgggagtattgttttttgagtatttgatatttgatattttagtttttatgtttggggtattttgggagggatgagttgggttttttagtattttggtgggaggaggatggcggtagatttttgagttgttttgttttgggagggtttgagtattcggaggtatgtagtgaggttagtttattttttttgtggtttaggtggataggtagtatggtttgttttgtatagaagggaatttagtttattagttgttggttgggtgaggattttggtatgttaggtgtttagtttttgtttgggtgtatagttaaagattttgtgttttgttttagttgtgtagttaataaatggagtcgatagttttgtgattttggtttggtgtttttttgttatattatttttagttttgagtttagggtaaagtattgttttggttaggggtgtttttgttgaggtttttgttttttaagtttgtgttgtgattgtattattgggtagtatttttagggtgtttagtattgtgtcggtggttgggggagatagtatttagattaaagggtagtaggtttggggtttttggtagagttaggaagaagtgttatagttattatttgtgttttttatataagggtaattggaatattgtataggaagggtagataaggggtagataagtaggtagagttaggtcgaggttattgtaaatattttatgatagttagatgtttagggatttgtattagtagtttaattgagatttggtggaacgtttgagagttggaatatgagtatgtttttagaaatgttatttgttgttttttttatagtaggaatttttttatttttttttttttgttttatttgatttggagttttaagtaaatattgcgtgttttttgtgatagatgttgttagagaatagtaagataggtttttatgaaataattattaaatgtatagtttttagtgaggggagttgtggaaggagtattgggagatttgagggagtgttttgaatagggttggagagtattttagatttaggggaaagttgatgttgaggagtttttgtgttgttatagttttagttgtgtattttaatatattatatttagaaagaggttatttatagtggagagagatagtggggtattttattattgtttttttagagtattttttttgttttcgtaattttattttaaaaatttagtatatttatttttaatgttgttttaatagttttattgtatttgtgtgatatttagttttatgttttataaaagtagatgtttgggattttttttattttagttagattatagttggtgtatttttaagtagttttttttgtcgggtagtggagtgtggtgggaggaattatagtgttaaattatttatttgttgtttttgtgatttttaattttttaggtaaggatttttagttttattgtttttatttgtgaatgaaagggttggtttttatttagaggtagattgtgggattatataggatggtttatgaaaggagtagggatttatattatatattgtgttttttttttttttttaatcgttgttatcgtttattttgtaaagttaggattgggtgtagtggtttatgtttgtaattttagtatttcgggaagtcgaggcgggcgggttacgaggttagaagttcgagattagtttggttaatatggtgaagttttattgttattaataatataaaaattagttaggtatgggtggtacgtgtttgtagttttagttatttaggaggtcgaggtaggagaatcgtttgaattcgggagatagaggttgtagtgagttgagatcgtattattgtatttagtgtaagattcggttttaaaaataaagttagatagtgttcgaggtttgggagtagaatttgattttgttataatgaaaggtttagtgggaagtaaattatttggagaggggaattgtgttttttgtggttagattttttaggttttacgtttgggaaattgcgttttagaaggttagtgagtagttgattttagttttaggtatgttgtttcgaattattcgttgttatagttgttttaaagatttttatttattttatttttatttgtgtggttgttgtaagtttgatatttttttttgatatattttttttgttttgtttattatttgggatttgttttttgttatttttaattgtagaggtatttaaagagtttttttttggggtatataggttttttgagtttaggtaagtttggagtagttgtttggttatttttagtagatgttgtaggattgtgattttgtataagtgttttttgtgtattttattaggttatgaggtagtttattattaaatgtagtagtgtgtggttaaaagggacgtggggtagagtttagtggtaaaaggttatttttttcgtggttgtgtttggtgttttaagagaatgagtttaagaatagtgggttatagttttttgatttttggggaagatcgtgagaaggatgttgtagttttttatgtgagagcggaggttgttttttttttatagataggagaataaaagttttatgtgttattttattgttggggttgggattggggtcgaggttaaggttaaggtttagtgggtttaagttaaaagttaattgtttatttatttttttttgttttttttttttttagt

SEQ ID NO: 4 - DNA, 10619 bp, Artificial Sequence
  chemically treated genomic DNA (Homo sapiens)
attagaaggaagagaaatagagggaagtaagtaagtagttaatttttgatttagatttattagattttgattttgatttcgattttagttttagttttagtagtgggatagtatatgaaatttttgtttttttatttgtgaaaggaggatagttttcgtttttatatgaagagttgtagtattttttttacgattttttttaagggttagaagattgtagtttattgtttttgagtttatttttttaggatattaaatatagttacgagaaaggtggttttttattattgagttttgttttacgttttttttgattatatattgttatatttagtggtgagttgttttatggtttagtgaaatgtatagaagatatttgtgtagagttataattttgtagtatttgttgggaatggttagataattgttttaggtttgtttggatttaaagggtttgtgtgttttagaaaagggttttttaagtgtttttgtagttaagaataataaggaataagttttagataatgagtaaagtagagaaagtgtgttagaaaaaagtgttaagtttgtagtagttatatagatgggagtggaatgaatggaggtttttgaggtaattgtgatagcggatggttcggggtagtatgtttagagttggagttagttgtttattggttttttggggcgtagttttttaggcgtaggatttgagaagtttggttatagggaatatagtttttttttttaggtggtttgttttttattaggttttttattgtgatagggttaggttttgtttttaggtttcgagtattgtttggttttgtttttgagatcgagttttgtattgagtgtagtggtgcgattttagtttattgtaatttttgtttttcgggtttaagcgatttttttgtttcggttttttgagtagttgggattataggtacgtgttatttatgtttggttaatttttgtattgttagtagtaatggggttttattatgttggttaggttggtttcgaatttttgatttcgtgattcgttcgtttcggtttttcgaagtgttgggattataggtatgaattattgtatttagttttggttttatagagtggacggtgatagcgattgggaagaaggggaagatatagtatgtagtgtgggtttttgttttttttataagttattttgtgtaattttataatttgtttttgggtgggaattagtttttttatttatagatggagatagtggggttggaaatttttgtttggggggttgggagttatagaggtagtaaatgaatgatttgatattatgattttttttattatattttattgttcggtaggaagagttatttaaaaatatattaattgtgatttgattaaagtaagggaagttttaaatatttgtttttatagaatataaagttaaatgttatatagatgtaataagattattaaaatagtattaaaagtaaatgtgttgaatttttaggatggagttgcggggatagggaaaatattttggaaaagtaatgataaggtattttattatttttttttattgtgagtggtttttttttggatgtgatgtattaaaatgtatagttaagattatggtagtataaggattttttaatattagtttttttttgggtttggaatgttttttagttttgtttagagtatttttttagattttttaatgttttttttatagttttttttattaagaattatgtatttggtgattattttataagggtttattttgttattttttagtaatatttgttatagagggtacgtagtgtttgtttagggttttaagttagatggaataaaaaaggaaggatggggaaatttttgttgtagaagagataataaatggtatttttgagagtatatttatgttttaatttttaaacgttttattagattttaattaggttgttgatatagatttttaagtatttggttattatggaatatttgtaatggtttcgatttggttttgtttgtttgtttattttttgtttattttttttgtgtaatgttttagttatttttgtataaagagtataggtaatggttatggtatttttttttggttttgttaggggttttagatttgttgttttttggtttgggtgttgttttttttaattatcggtatagtgttggatattttggaggtgttgtttaatggtgtaattatagtataagtttagaggataagagttttagtagaagtatttttgattaaagtaatgttttgttttaaatttaggattgagaatgatgtggtagaaaggtattaaattaaggttataagattatcgattttatttgttagttgtatagttgaggtaaggtatagaatttttggttgtgtatttaagtaaaaattgagtatttaatatattagggtttttatttaattagtagttggtgaattgggtttttttttgtgtagaataggttatgttatttgtttatttaggttatagagagaatgaattgattttattgtatgttttcgggtgtttaaatttttttaggatagagtaatttaaaggtttatcgttattttttttttattaaaatgttggagggtttagtttattttttttaagatgttttaggtatgagggttaaagtgttaggtattagatatttagagaataatatttttatgtaaatgtaaaagaaggtatttaaatttaagtaagtgaaaaggtttttttttttttggtttttattagtttagtttattagattaattttaaattttgaattaaaattttgaatttatttttaattattattatataaaaattatagttatttttaataataaagagttttttttattattaagtatattaaaggaaagtttagaatgttgttattattatttttttttttagatagggtttgggtttgggtttgggtttgtcgtttaggttggagtgtagtggtattattttagtttattgtaatttttattttttaggtttaagtaattttttagttttagttttcggagtagttgggttttaataggtacgtattattacgattcgttaattattgtatttttttgtagagataggttttattatgttggttaggttggttttaaattgttgagtttaagtaatttgtttattttagttttttaaagtgttgagattataagtatgcgttattaagttcggttttagaatgttaaatttgattaggtttagttttttttattcggttttttttatagttaagttttttttaattttttttatagcggtgttgttttagttttaatatagtttggatttgggttttgtttgtttttttattagaatacggtattttgtttatttgttaaggcgtttggatgttttttttttagaataatatttaaaaatgcgtaataaaaaggttcgtaaatggttagttacggtggtttatgtttgtaattttagtattttgtggggtcgaggtgtatggatcgtttgagtttaggagtttgagattagtttgggtaatatagtgagattttattttaaaaaataaaataaataaaaaggttcgaaaaggaaatattgagataattattaaaatatttgaaaggtaatttgggtatagtaattcgtgagtttttaagtattaaataataagatttagtatagtttttaataattgtgatttttgtagtaatgagagtaaattatattttgaaaaatttttaattgtaaagtgatatgaaaatatttgtaattattattggtgaaaaaaaaatagggattgttaatatgtttttgttttgttgtttatatttatgattagaggaaataattttatttagaggttagtggagatggagatattaatttttttttatttaaatttatggattttttgttttttatttattattttatagattttggggtaagagtttttgtattaggagtgagaattttataataggttgttttgtatatttaaagtaagttttaggttttttagtgggtaataaggttttttaaattgtaggttttgtttatttttttatttttatttttttgttttatttttgtgaattaacgatttttaattaagtttttatttttagttgggttatttcggatttttaggtatataatgtttagagtatagttttattaggtggtatttatttttttttacggtaatgtttgtttattagttatttttcgtttaattaaattggaaatttttaaaggtggattttgtgtttttaaaatttaatagagtgtttagaatttaaaaaatgtttattaaataagtattgtgtgttacgtattgatttaggtatgtttcgaggatattaagatgataggtatattgtgaaataagataacggaagtatatttggtatttgggtatttattcggtaaatgtcgtttttttttgtattaagtattgaaaatttattgagggatatttggttatttttaaaatatattatagtttatggaagggaggaaaattaagttattttgattatgagtattaagtttgggtaatatgttggaagcgaggaggaatagggtagatgagaattagaattattaatataaaggtagatatcggtaaattggaagttggaggtaggagtttttgggaaatgataggggtttttaagtttattattttatagaaggtttaggaaattttagaaggggatttaatttattaaaaagtttatatgagaaatttttttggagttatttttatttaaattagatagttgtaaatgtattaagagaacgcgtttgtgaatttggaaaatttggggaaaatgttattttaaagtataaattaggtttaaagtgaatgtattgtatagaaatgatatttttttgtatagttttgtttaattaaaataaaaaatgagagtgagcgtttaaatgacgtgttgaaatgattgttaaaaataggtttaataaaaaaagaaaaaaatttatatgttagtcgttattatttatgtagaataaaaattttttagaataagataggttaaaattagattagtttaaagagattatgtataatttttttttaatttttgaggcgaacggtagtaataaaatatcgttatttagaaaggagaagagaagaggtttttcgtttttataaagcgaaaggtaatattagttgtagattttatttttcgggttttttttgtaatattagtaaaatttttcggaagggtcggtcgggtcgttcgggaggaggggcggtcgcgggtttataggttttaagtgtcgtttcgagggttcgggttcgggttcgttcgttttttggggtcgtttttttttagttttttcggatatagttaattcggggcgtcgcgttttcgtttcgtcgttcgtatagggttcgtatttgtattatgatggttattcggagcgagtttttggggatgttttcgttgtattttttgtaagaggcgcgttcgtttttggcgtattcgattcgatagagtttattcgaagatttcgttatttttttttagttgtcgttaaagtttcggaagttcgacgttacgatttagaaatacgttgtcgtttcgtcgtttcgcgtgcgtttatttagtcgtagtttttgagcggttagagtcgttatcgaatacgtcgtatcggttatcgtcgttttttgatagattgttgatgtttggtcgcgggaacgtttacggaattcgcgtttacggggcggggtcggcggcgcgcgttttttgtcggtcggggggcggagtttttcgggcgtttgtcgggtggagttttgcggtcgttgtttgggggtcgaggcggggtttgggttgagttagtagttttttggaggattcggcgttatttttttgattgttttgttttaggaagttttatttgattttataattaattttatttttaattttttttttttttatttttgagattgagttttatcgcgttggagtgtagtgtcgttattatggtttattgtagtttggaatttttgagtttagcgatttttttattttagtttttcgagtagttgggattataggcgtttattataattggttaattaaaaaaaaattttttttagggatagggtttcgttaagttggttagattggttttaaatttttgttataagtgatttttacgttttagtttttcgaagtgttgggattaggggtatgtgttattacgtcggttttaaatttttaagtgtgtttttttttttttgagggtagttgggttcgggaagtcgggttttcgtttcgggaatatagttgattggttcgaggtggattttgtagtgttaggtttatttttttggtttggacgggcgttttaatttgtcgtttatagatcgtcgggataaaatattaattgaaatttagtattttttttattatgaatttgattataaatattaggagtattagtagtatttgtgattttgtgggtaatagttattatagacgtttttatgttattttatagttgttggtgataattcgaaatattattaagtttattattattcgaaattgtggtaatgatagtatttgttgttattagatattttgtgtgtgtgtgtgtgtgtgtgtgtgtgtgtaaagaaagagatggggaatttttttatgttgtttaggttggttttgaatttttggttttaagtaatttttttatttcgattttttaaattgttgggattataggtatgagttattgtatttggtttagattttgttgtttaatatagaattatattttaaaatatagtttattaaaattggttttttttttaattttatgtatttttttttttattttaaagattgtaatatgagtgtgttttatttgaaaatatttaattttggtatagaggataagaaaaataagtagatgaataaaatttataaaaagtgttaattatagagaagaagttagtggtttaagagataaggatgttgagtaagtaagaaggttgtgagatataggtcgaattttaaaagttagtaattagttagatacgttgaaggtaggttgggtatagtggtttatgtttataattttagtattttgggaggttgaggtggtcggattttttgagtttaggagtttaagattagtttggataatatggtaaaattttgtttttataaaaattagttgggggtggtggtaggtgtttgtagttttatttattcgggaggttgaggtgggaggattatttgagttttgaaggttgaggttgtggtgagttatgatagtgttattggattttagtttgggtgatagtgtgattttgttttaaaaaaaaaaaaaagatattttgaaggtaaatagaataagtggaaaatatgatggaataaataaaagttttatttagagaatgattaagttaaaaggtatgattatgttatttttgggttgataattatattatttttaaatggttatttattggtgataagattatggttttattttggtatttatatgttttgttttaaaaatgtagttaaagtttaggtttgtttagtaggttgattggtgagttgtagttgtggttgagtgtgtttgtatttgtgtttttttgatagtgtagtgtgagttgttttaggtattttttgttgagtcgttttgagtatttttaattttgttagtgggataggttgatgcggtagagagagggaaaatatattaatattagttaggtgtagtggtttatgtttgtaattttagcgttttgggaatttgaggcgggtggattatttaaggttaggagtttaaaattagtttggttaatatggtgaaatttcgtttttattaagaatataaaaattagttgggtattgtggtgcgtgtttgtaattttagttattcgggaggttgaggtatgagaatcgtttgaatttaggaggtggaagttgtagtgagtcgagattacgttattgtattttagtttgggtaatatagtgagatagttttaaaaaaagaaaagaagagaggggaggggaggattttttaattttaggttttggtggtgtggtttatttgtttcgtttgtattttattttgtgtatgttatgtattttatcgagtttttgttgtaagtggttttaaattgatttaataaatttgtaatttaagtattataatttggtttgtgaggttttttgttttgtaatttgtgggatagtttgtttgataatgtatttagaagttattattgtattaaggtaggtttttttataatatttattttggaaagggttttatggattattaaaggggttttaggtatatatataaaaggttaagaatttttgttttagaatttaaggaaagttaattattatttattgtttttttaatattttagtttggatggtttatatgtatttttatttatgtttaaaattgttttagtgttttttattttaggaaatggtttattattttttgtattatttaggttaaatgttttgtagttaatttgattttttttttttgttttatgtttaatttattttcgaattttaattttttgattttgatttttttttatggtttagttgttattttttttggtggttttgtattttttattagaatgtaagttttatgagggtaggagtttgtgtttgttttgttgtaatagttttagtgtttggaatagtgttaggtatttattaatatttgttgaatgaatgattgaattttatagttggtttttttttcgtataggttaatagtttaattaataatgttattttatatttgtatataattaatttatattgtgttttaaatttgaaatttttatgttgatttataatttttatagtatattaggtaaagttggtggttatataaaatattattaggatagggttgtttgaagaattatttgataatttttgttaataatataaaaatagaaaaagaacgttattatgtagtttataaataaattttaggtggttttatattttaatttttttttttaaaaggaatgagttgtgtttaggtaggttaaatgttttatagataagagaaaaaaaaaaaaagttgttatagaattattttatttgttattattatcgattttattttttattttttttattttttttgttttttttcgttttgttttttttttttgtttttttcggttttgatagtattatttttgttatattagtttttttttggttggatatgtagtattttgtttttggtattttttttttagttgagaagttttttttttgggttgtttgttatttgtagtatggttatttatgttttttttaggtttttggtattattgttagtggatagatcgggattttttttgatttgagggtagtatttagaatataaagtgaaagtttaaaggaggtttttcgggtgtattagaatttttgaatttttgttttattttttttttaggagggatattagtttttattttttttttataaagggttttgaatatttttggttatgtttttaatttttttttttttagtaagtaaggttttttatttttttgaatatgttaatgaatattttgagaagatgaatgaagtgtttggttgttttttttgtattttggtaagcgtgcgtagaatgttcgtgatgatattttgtttttgggattattgggttttttttcgtttatgtttagttatttttgtttagtgaggtatagaattatttagtgtttatttggtttttatttattttggtagtgtttttaggtaaggagttttagattagtttggataatatagtacgattttgtttttatatatataaaaaagtaaataaatttataataaatatttggtgtaaggtatgggtttagttatatttttttgtatgtggagatttattatttgtggaagagattgttttttttttattgaatgattttggtatttttgttgaaattatttaattatatatgttgagggtttatttttgggttttttattttgttttattggtttatatgtttgtttttattttaacgttatattatagtaagttttgaaattagaaagtgtgagatttttaattttatttttattttataaagttgatttgttttggtttggttttatattttgttaagattgattaggagtggaaagaagagatggtggttcgtgtttgtaattttagtattttgggaggttaaggtaggcggattataaggttaggagtttgagattagtttgattaatacggtgaaattttgtttttattaaaaatataaaataattagttgggtatggtggtgtatgtttataatttaagttatttaggaggttgaggtaggagaattttttgattttgggaggtagaggttgtagtgagtcgagattgtattattgtattttagtttggtcgatagattaagattttgtattaaaaagaaaaaaaagaaagaagagagatatataattttgattgttggtgtatgtgtgtgtggtggtggggtgggggggatgtttaaagttttatattagggattttttgttaagtaggtgaggt

SEQ ID NO: 5 - DNA, 6669 bp, Artificial Sequence
  chemically treated genomic DNA (Homo sapiens)
aaaataatttaagaataaaagaagtgtatttttttgtgtaaatttattgataaaggtttttgaataggtaagaaagtatgtttgagttttttttttaatataatattatttttagtttatttttattataagtggaggtggtaatgagtaattaaatgaattgaaggggaaataatcgaaaaagagaagaaaggataagattttaattatatgaagggtattttttttttttatttgtagagagggaaagataaaaagagaggtttaaagtaagtaagagatagtaaagtacgttatgtgaaaatattttttttatatattttattattttttagaaagattagtaatttaatgttttttaagtatgtaaataatttttaggaagtcgtattttatgttgttttatattattagatttataaataatagggataaggtttttgtttataaagttataatttatttggagatagaagatatatatataaataattgtaatgtaaagtaaaaatggtaagaaaatagagttgatttattttatgggaagggaggggttggagaaattattattaagtttggaaattatgtgatgtttgaaggtgtagatgagtattgaaggatggttgggaattttaaagaagttgatagaaagtatatatgtaattatatttggggaatatgtttagtttggatgtagtataaggtttatgaagggtaatagttggagatataatagaaaagataaaatgggtaaggattatgaaaagttttagatagtaatgagtatatatattattaaataaataaaggagtgttataattagagttatatttttgtaaatgttttattaaatatttatgttttggtgatataaaggtgaatagaattagtagtttttgatttgttaggggtgtgttagttttggttttgtttgattttaaatacgtttttgatttttttgtcgttttttattgtatgatataaagtttgattttatataggtaatgttttttaagtttttttgtcggtttgttattggttgggtttagtaaataggaagtattggtgggaggttggagggtaggaggaagtagttatattttttttttattttttttttgttttagtagagttttttttaagattattatttttttattagataagttttttacgtttcgtagttaaattagttttttgattgttttttttttttttattttttttattagtatagtggttttttattgttgttaattattgagatgttttagttgtaagttgttgggcgttttagttttttttttattagtgtaaacgaatttttttattaaatttttttatgttaaatatttagaatggtttttattttttttattgtatgttgttttatatagaaggtaataaatttatttaagaaaatttttatagatgatagttttggggatttttagaatttttgaagtttgtttatttatttatgattaagattattaataaaataaaaaattaagtaagttttaaattgggaagatgaaaaagttttagaaattgatggtagtgatggttgtagaaaaatgttaatatagttaatattattgatttgtatattaaaaataaataataataataataataataataaatttattgttttgggttttaagaattatatatttttaagtgttgaattttgttagtatattttattaaaaaaaagtaaatatatatttataatgagatatgataaggttgtaatagaagtataatgttatggtaatatttaagaagtattgattgtatttgttgaatgaagttttagagattaggtatgatttgaattttgaatagaagtgtattaggaagttaaagagaagtagaatatatataagaatttttaaagaaattttaattcgtttggtatgtttgtagtataaaatagatgttaggaagttgagattaagttggagaggtaggtaggattagttttatagagtattttgaataaatagataaaaattgaattgatggtttagaggtaataaatattttgatgtattttggtttatataatattttgtaaaattttagtaaggtaataagggttatttaagtggagtagtgagatgtaaaagttagagtgtagtattttgaaggataaaaggtaggtgaagaatagtaattaagtggaatttattgttttttgaataaatttgatttgtgaaagggtgatatagaatataagatagaatgttttgtttaatgggtgtttaatgtttagtggggtttagaaaagtgtttttttgtgtgtatgtttaagaatttaaaaaaaatttaattatttgaatattaaggggagaaaatttaatttttttatgtttagtaattggtatagtgtttggaatatattaggtatttaaagatttgttagaaaaaaaatattatgaagggattaataataagaggagttgaagatggcgagggggtattgataggaaaagaattatgagtaaataataaattttatatgagaaagatatatacgatatgtatttatttaagatgtaaaatgataaacgataaaagtaagagtattaggtatggggaggtttttttgtattgtatatttttgtttatttgaaatttttagtaagaatagaattattttaatttttagattaaaaggtatagtgtgaaagttttagggagatttgtaataatagtaaataaaatgaattgcgaggataattgtttgggaagttatgatagaagtttaaaagagaagtaatggtaggtatattgcgggattggtggtagtgaaaatggaatgtgaatgataaagatttttaagataagaaaattatggttggcgttttttgtttattaaatgaaaagtaggaagttagtagagtagttggtttgtggagaaagaatatttatatatcgatgtgaattattttaattagaaaatgatattgtttttttagggtttttttaattaggggtgattttgttttttaggggatatattagtaatatttagagatatttttattgattataattgggtaagggtagggtggggaacgggtgttttattgtaatttagtgaatagaagttaggaatgttgttaaatattttataatgtttgagtataggatagttttttataataaagaattatgaggtttaaaatgttaatagtattgaggttgagaaattatgtttaagattatagttatcgaaatttaattagattattaaattgttaaaatttagaatttttaagtaaaagattaattagatattaataaaatattaaatttgttattaagtttttttaaaaatggatggtggaattattttcgtttaacgttttttgtaaaatgtgtttattaagagttttgcgtaaataatatttttgtggatagcgttgggtatttaaaagaggtataagataaatgggtttttcgaataataaaataatagtagtaatggttgtgaatattatgggaggttttattatagatgtttgttatttatttttagggacgtcgtatacgacgttcgtaaattattggttcgggttttgagttttatttggttttcgttttttgtagtataattttttttatttttttaggggataaataataataaaattcgttttttatatagataatatattttgatagataagtgatttataaataatttttttttaaatgaaggtaaaattagggttagaaaacgtttaattaatttaaggtaattaattttttgaaatttttcgttgattaaaggaataggaattgttgttttaaaatatgtaattggtattttatatttttatattggacgacgtattgcgtggaggatggagaaggaagattatttttatttttaaattcgtagttataagggcgggttattagaagggcgttaggaaggtttttttataaagatggggggtcggggaattttttatttgttttattttggttttaatattgaattaaggaaattgcgtttaaggttgaagtatacgtaattcgttcgttatgtagataaatgtttttttaggggttttaattaagtgtggaggtttgatttttttttcgaattcgttttaggtgttttatttcgagttttttttcgggttttttttcgttacgtagtttttgaagagaggagtatttatatataaagaggtttaaattgtttagaattttcgaatgacgaagaattatcgttagttttaattcgtaagttgggaggtaaaattttaaagtttttttattaagggaaaatttttggttttaaaggtttttttgtttagtatagtcgggtttaataattttttttttcgcgttcgcgtttatttaatataagtcgggttacgttcgagggtaataatatgattaaaattatagtaggaattataataaggaataagatttaggttaaagtaaatatagcgatagtttttgcgtcgtattttttggttttagtggcggtattgaattcgcggtaatttgtttcgtttttttcgttttacggtagttaatcgttttcgttagagaaagaaaggcgtcgaaatgaaattcgttttcgttcgttttcggaattgtcgttattttcgtttttagatttggaggggcggggatgaggagggcggggaggacgacgagggcgaagagggtgggtgagagtttcggagttcgagtcgaagggcgagtcgtaaacgttaagtcgttggttattggtggatatggcgtaggcgcgtttgtttcgacgggtcgaatgttttggggtagtgttttgagcgcggagatcgcgtgatattggatgcgtatgggtatatcgtgttttgcggttgtttggcgttgtttttttttttagaagtgggcgttgggtagttacgtagggtttgaatcggaagcgggagtaggtagttgcgtggttaacggagaaaagaagtcgtggttacgggaggaggcgagaggagtcgggatttgcgttgtagttatcgtcgcggttgatattattttgatttttcgagtgtagtggtaggggcgcggaggtaacgtagcggtttttgcgttgggaaatttagtcgtgtgcgatttagtttgttttttttttagatcgttaattttatgtatttttttagagtggtttttgatttttttttttttttattttattttttttggttttttttcgggtgtttagcggatttggttaataattttttttttttaaacgttttgaattgaattttgttttttgcgtattttttttttgtgttattttagggtttagatttaattacgcgatttgattagttattttttgatttttttttcgtatttagtatttttagttagcgagtatttattgatattttaattttagtttcgcggttaagagtttgggttttggaattatacggttggaattggaattttgttagtcgtgtggtcgttttttattgttttgtgaagataagtgagataattttgatttgtggtgagtattcgtgagcgttagttgttgtatttattaggtatagataagataattatagtggatgataatgtatgtggtgataggggagtattttgatggtagaggagtgattttggttttttgtaaatttagtttgagattattaatttagtttgtggtgagatttcgtagtgttattttggtagatggtagaagttttttagatggaaggaaaaatgcgtgtaaaggtataaagtgtagaaggattttgaagttttagcgtgaggtttggtattgaatgaaatatattttgtgggtttttagttgttgaagttataggaatggatgagattaagaaaataaagttgtttttgaggtatgagcggaagaagagatattaggagattttcgaaatagttataacggaagttaatatgattattgttaatatttgttgtgttttaggtattgtaagtatgtatatgggtttttaaagggatttatagaggtaggtattagtattgtttttttttttattattgagaaattgaggtttgaagagattagtgaatttgttttagattatatagtttgtaagtggttgaattaggatttgaattaatataatttgattatagaggttatattttttagtattagaaaagaatggtatgttaagggtagagttatttttaggaagatgggatataagcgttattgttaagttgtgtaaaggggttaatttggttgagatttaaaaaggaatattgaattcgttaatttagaggttcgtaggaagtaggaaatttttattttttcgtttgaattttgagtggaatttagatattttggattaatgtataagtgaagtttatttttatatggtgatatttatattttagttgattatttaatagtttttttgtttttttttagtttcgttaatatattgtgttttttaatattgtagaattttttggttatgttagtttttttttttgaagtgttggttttttagttttttttttgattggtattagttagtttagattttggttttattataaatttttttgagatatatgttttttgatagtttatttaaaatgattttttttatagttattttttattattgtgtttttgtttttttaga

SEQ ID NO: 6 - DNA, 6669 bp, Artificial Sequence
  chemically treated genomic DNA (Homo sapiens)
tttgaggaaataaaaatatagtaatagaaaataattgtagagagaattattttagataaattgttagggaatatatattttagaggagtttataataaagttaagatttgaattaattggtgttaattaaaaaaagggttagaggattaatattttagggaaggagattagtatagttaaagggttttataatgttaaagaatatagtatgttggcggaattgaaagaaggtagaggaattattaggtagttaattagagtatgagtgttattatataaagatgaattttatttatatattaatttagaatatttaggttttatttaaggtttaaacgaaaagataaggattttttattttttacgagtttttgaattgacgaatttagtgtttttttttagattttaattaagttgatttttttgtataatttgataatgacgtttatattttatttttttagaaataattttgtttttggtatgttatttttttttagtgttaaggagtgtggtttttgtagttagattgtattagtttaaattttggtttagttatttataaattgtataatttagagtaagtttattaatttttttaaattttagttttttaatgataaaaggaaaaataatattagtatttatttttatgagtttttttaaggatttatatatatgtttatagtgtttgaaatatagtaaatgttagtaatgattatattaattttcgttatgattgtttcgaaagttttttgatattttttttttcgtttatattttaaaaatagttttgtttttttggttttatttatttttatgattttagtagttgaaaatttataaaatatattttatttaatgttaggttttacgttggagttttagggtttttttatattttgtgtttttatacgtatttttttttttatttggaaggtttttattatttgttaaggtaatattgcgaggttttattataaattgaattgatagttttaggttgagtttgtagagaattaaagttatttttttattattagagtatttttttattattatatatattattatttattgtagttgttttatttgtatttggtaaatatagtagttaacgtttacgagtgtttattataggttaagattattttatttatttttataagatagtagagagcggttatacgattgatagaattttaattttagtcgtatgattttagagtttaagtttttaatcgcgaggttgaagttgaaatattaataaatgttcgttgattaaaagtattaaatacgagagagagattaaaagatgattagttaagtcgcgtagttaaatttgaattttaaggtgatataaaaagaggatgcgtaggaggtagggtttaatttagggcgtttaaaaggaggaggttattggttaagttcgttaagtattcggagagaggttaggaaagatggagtgaggagagggaggagttaagggttattttggaggggtgtatgagattggcggtttggggagaggatagattgggtcgtatacgattgaattttttagcgtagaagtcgttgcgttgttttcgcgtttttattattgtattcggaaggttaaagtagtattaatcgcggcggtggttgtagcgtagatttcgatttttttcgttttttttcgtggttacggtttttttttttcgttagttacgtagttatttattttcgttttcggtttaaattttgcgtgattgtttagcgtttatttttggaggaagaagtaacgttaagtagtcgtagagtacggtatgtttatgcgtatttagtattacgcggttttcgcgtttaaaatattgttttaaaatattcggttcgtcggagtaaacgcgtttgcgttatgtttattaatggttagcgatttagcgtttgcggttcgtttttcggttcgggtttcggggtttttatttatttttttcgttttcgtcgtttttttcgttttttttattttcgtttttttaagtttgaggacggaagtgacgatagtttcgaaggcgaacggaggcgggttttatttcggcgtttttttttttttggcggaagcgattggttgtcgtgaagcgaaagaggcgggataaattgtcgcgagtttagtgtcgttattggaattaggagatgcggcgtaggagttgtcgttgtgtttgttttaatttgagttttgttttttattgtggtttttgttgtggttttgattatgttgttattttcggacgtagttcggtttgtattgggtaagcgcggacgcgggaaggagggttattggattcggttatgttggatagaaggatttttgaggttaaaggtttttttttggtagggaagttttggggttttgttttttagtttacgagttgagattggcggtgatttttcgttattcggaggttttgggtagtttaagtttttttgtatgtagatgtttttttttttagaggttgcgtggcgaggggaagttcgaggggaagttcggggtggaatatttggggcggattcggaaggaaagttaggtttttatatttaattaggatttttgaaagagtatttgtttgtatgacggacggattgcgtgtgttttaattttgggcgtaatttttttggtttagtgttgggattaaaatagggtaaatagggagtttttcggttttttatttttgtagagagatttttttggcgtttttttaataattcgtttttataattacgaatttgggagtaggggtgattttttttttttattttttacgtaatacgtcgtttagtgtagaggtgtgaaatgttagttgtatattttaaaatagtaatttttgtttttttgattagcgaaaaattttagagggttaattgttttaaattagttgaacgttttttagttttagttttatttttatttgaggagggattgtttgtgggttatttgtttgttagggtgtattgtttgtgtgagagacgggttttgttgttgtttgttttttgaaagaataaagaggattgtattataggggacgagagttaggtaaagtttaaaattcgagttagtaatttacggacgtcgtatgcgacgtttttaaaagtaaatggtaagtatttgtgatgaaattttttatagtatttatagttattattattattattttattgttcggaaaatttatttgttttgtgttttttttaaatgtttagcgttgtttataaaaatgttatttgcgtagggtttttgataagtatattttgtaggaaacgttaaacggaaatggttttattatttatttttgaagaaatttaatgataagtttaatgttttgttaatgtttgattaattttttgtttaagaattttgagttttggtagtttggtaatttagttgagtttcggtaattatagttttaaatatggttttttagttttagtattgttaatattttgggttttataattttttattgtggggagttattttgtgtttaaatattgtaggatgtttagtagtatttttggtttttatttattagattatagtaggatattcgttttttattttatttttatttagttgtgattagtgaaaatgtttttagatattgttagtatgttttttggagggtagaattatttttagttaagaaagttttaagaaagtagtattattttttaattgaaataatttatatcgatgtgtgagtattttttttttataaattagttattttgttgattttttgttttttatttaatggataaaaaacgttagttatggtttttttattttaaaaatttttgttatttatattttatttttattgttattaatttcgtaatgtgtttgttattattttttttttggatttttgttatggttttttagatagttgttttcgtaatttattttatttattgttgttataaatttttttgaagtttttatattatattttttagtttgaaagttgagataattttatttttattaaaaattttagatgggtaggagtatataatataaaaaagtttttttatgtttaatgtttttatttttgtcgtttattattttatattttaaatagatatatatcgtgtatattttttttatatgaggtttattatttatttatgattttttttttattagtattttttcgttatttttagttttttttgttattggtttttttataatgttttttttttagtaaatttttgggtgtttagtatgttttaaatattgtgttaattgttgaatatagagaagttaagttttttttttttagtgtttagataattaggttttttttaaatttttaaatatatatataaaaaaatatttttttggattttattagatattagatatttattaaatagaatattttgttttatgttttgtgttatttttttataagttaaatttatttaaagaataatgaattttatttagttgttgttttttatttattttttattttttaggatattgtattttgatttttgtattttattattttatttaagtagtttttattgttttgttgggattttataaaatgttgtgtgggttagaatatattaaagtgtttgttgtttttgggttattagtttagtttttatttatttatttaaggtgttttgtggaattgattttatttatttttttaatttgattttaattttttaatatttgttttatgttgtagatatgttaaacgaattgaagtttttttgaaaatttttgtatgtattttatttttttttggttttttagtatatttttatttaaggtttaggttatgtttgatttttgaaattttatttagtaagtatagttagtattttttaaatgttgttatagtattgtatttttgttataattttattatgttttattgtagatgtgtgtttatttttttttgataaaatatattaataaaatttaatatttaaaaatgtatagtttttaaagtttaaaataatgagtttgttgttgttgttgttgttgttgtttgtttttaatgtatagattagtagtgttaattatattgatatttttttgtaattattattattattagtttttggaatttttttatttttttaatttgaaatttatttggttttttgttttattagtagttttagttatggatgaatggataagttttaagagttttgggagtttttaaaattattatttgtgaaggtttttttgaatagatttgttattttttgtatgagatagtatgtagtaaaaaaagtagaaattattttgagtatttaatatggaaagatttaatgagagaattcgtttatattggtgagagaaaagttaagacgtttagtagtttataattaaggtattttagtggttagtaatagtaggaagttattatgttaatgagaaggataaggagagaggaagtaattaagaggttggtttgattgcggaacgtggaagatttgtttgatgagggagtggtagttttagaggagattttattgaggtagaaagggaatgggggaaaaatatggttgtttttttttgttttttagttttttattagtgttttttatttattgagtttagttagtagtaggtcgatagaagagtttggggaatattgtttatatagagttaagttttatgttatatagtagagagcgatagaagggttaagaacgtgtttgaggttaaataggattaaaattgatatatttttaataggttaagagttgttggttttatttatttttatattattaaaatatagatatttaataaaatatttgtaaaagtatggttttgattatgatatttttttgtttatttaataatatatgtatttattgttgtttaaaattttttatgatttttatttattttgttttttttgttgtatttttaattgttattttttataaattttgtgttgtatttaaattggatatgttttttaaatatgattgtatatatattttttgttagtttttttgggatttttaattattttttagtatttatttgtatttttaaatattatataatttttaagtttagtagtggtttttttagtttttttttttttatgaagtgagttagttttatttttttattatttttgttttgtattatagttatttgtgtatatattttttatttttaagtaaattgtaattttatagatagaaattttgtttttgttatttgtggatttagtaatataagataatataaggtacggttttttaagaattatttgtatgtttaaagaatattaaattattaatttttttaggaaataataaaatatgtgaaggagatgtttttatatagcgtgttttattattttttgtttgttttaaatttttttttttatttttttttttttataagtaggaagaaaaaatattttttatatagttaggattttatttttttttttttttttcggttgttttttttttaatttatttagttatttattattatttttatttataataaaagtaggttgaagataatattatgttaagaaggaaatttaggtatatttttttatttatttagggatttttgttagtaagtttatataaaaaaatatattttttttatttttaagttgtttt

SEQ ID NO: 7 - DNA, 6020 bp, Artificial Sequence
  chemically treated genomic DNA (Homo sapiens)
atatatatatatatatatatatatatatttatagagatagtgttttattatgttttatatatatatatatatatatatatatatatatgtatatatttatagagattgtgttttattgtgttatttaggatggttttgatttattggggttaagtaatttttttattttagttttttaaagtgttgggaatataggggtgagtcgttatggttggttggttttttttgtttgtttgtttgtttttttagagatagggttttattatgttgtttaggatggttttgaatttttgggtttaagtaatttttttattttagttttttgagtagttggaattataggtttatattattgtgtttagttatttagtgttttgatgttataaatgatgtcgtagtgaataattttgtgtatattttattttgtttttgtaaagtatatttgttggataaatttttagaagttaaattgttgggttaaataatatatgtattttaaaattttataaatattgtttaagaattatgattttgatataaaataggggttttgaagttgtttgtttgtttatttatttatttatttttagatggagttttattttgttgtttaggttggagtgtagtggtataattttaagttattgtaatttttgttttttgggtttaagcgatgttttttttttagttttttaagtagttgggattataggtatatattattacgtttagttaatttttttgtgtgtgtatttttggtagagataggtttttattatgttggttaggttgattttgaatttttgagtttaagtgatttatttattttggttttttaaagtgttgggattataggtttgagttattgagtttagttaaagttgtatattaaaaattatggagtaattatttttttagttgatttgtttttttttaggtattgtattttttattttttttaaaataaataagtatatttataagttacgtatttatggttaagagttagagaaaggtttaggttgttttttgtggtaatttgaagaaaaatgtgaagatgtgtattagtaaattttttttaaaatagttgatgggaattcgttgataattattattgaaagcgatatatttatatgtatattagtaaaattttgtcggttattttttattaataaaggaatttttttttttttttttttttttttttgagatggagagatggagttttgtttttgttgtttaggttggagtgtagtggtgtaatttcggtttattgtaattttcgttttttgggtttaattaatttttttgttttagtttttttagtagttgggattataggtatttattattatattcggttaattttttatatttttagtagagatggggttttattatgttggttaggttggttttgaatttttgattttaggtgatttatttgtttcggttatttaaagtgttgggattataggtatgagttatcgcgtttggttttttttttttttttttttaagtaaaaaaaaaattttttttagagagggagttttattattttttttagtttggttttgaattattgaatttaatttattttttttttttggttttttaaagttaagagattataggtatgagttattatgttcggtttaggtatttttttatgttttataaatatagtgagttgttatttataatgtatttataagttgttatttataataatatttataaatgttgtttattttgaaaatgttgtgattattgttgggtatggtggtttacgtttgtaatttaagtattttgggaggttatggtgggaggatagtttgagttttggattttgagatatgagtttgggtaatatcgagatttattttttaaaaaaataaaataaaaagataaaattagtcgggttgtggtggtttaggtttgtagttgtagttatttgggaggttgaggtgggaggattatttgagtttgggaggtcgaggttgtagtgatttatgattacgttattatgttttagtttgggaggttaagtgaggttttgttttaaaataaaattaaaatttaaaaaatttatgattgtttggtatggtggtttatggttgtaattttagtatttttgtaggtcgaggcgggtggattatttgaggttaggagtttaagattagtttggttaatatggtgaaatttcgtttttattaaaaatatgaaaattagttagtcgtggtggtgggtgtttgtaattttagttattagggaggttgaggtaggaaaatcgtttgaatttgggaggtagtggttgtagtgagtcgagattatgttattgcgttttagtttgtagtttgggttataagagcgagattttattttaaaaataaaataaaataaaataaaataaaaataaattgtgattatagttttattattaagttttttttgtgagatttgttatttaaagttgtttagtgttgagaagttttttagtaatagttagtttttattttaataattttaatttatttaaaaataatgtgaggtaggagaatagggtttggaggtagggaatttaaggttgagtaaagttgattttttagaattgaattaaaaggaaaattttaattttttatatttaagtaataaaaagattattttttttgtaaattttttttttttttcgtttggtagatggaaaattgaaagtatttttgattggttgtagaaagtagatgtttgtatagtagtgtaattttgtaattttattttagtttttgattggttgttgtttataattaattagatgtttgtatagggtgtgatttttgtaattttattttagtttttgattgcgggttattattttatttatatagggtgtatattaagtaattaatggaaaatttttagagagtatttaaattttagaaaattttgtaatgggggttttgagtttttgtgttttggtagtttttgtagttttgtggagtgtatttttatttttaacgtgtttttgtttttgttgttttattttttttttgttttgtgtattttgtttaattttttgttcgaaacgttaataatttggtaatatgttgattatttattattttttttatagtgaagttagttgaatagtaagtatatttttgtgttgttttgtgatggagtatattatttaaatttattgtatttattaaggagaaaaaaatgatttttgtaaattgtatgttgaaatgatatttaatgtgtataagataaaattagtatagtaggtatagaggtttggtttttataattgttaattgaatttaaatatttgaaagatataattgtaatgtgtataggcgtttgttgattaaaaagttgtttgaggttaggcgcggtggtttatttttgtaattttagtattttgggaggtcgaggttggaggatggtttgagtttagatgtttgagattagtttgggtaatagatagatttattttatttatattaatatataaatatataattagttgggtttgatggtacgcgtttgtagttttagttgtttgagaggttgaggtgggaggattgtttgagtttaggaggtcgaggttgtagtgaattgcgttacgttattgtattttagtttgggtgatagagttagattttgttttaggaaaaaaaaaaaaaaaaagttgtttgagtttattagatttttaaagtgttttatttaaaaaaggttttttttttgttattttagtagaaagtagtaattttgttatttaatttcgataggagtttttgtatattttaagaaaaataaatagaatgaattaaagtatgtatggtagaataaatttggaaataaatttcgaagcgattagattttagaggatttgtttgtgattagtagagattattaatgtaaaattaaattatagattataaaagcgggaaaggtatttatagattatttagttaagttttttttgtaatgagaaggaagtagatttaaattgattggtttgtgagttaaatattatattaaattggggaaatggttcgtgtgtgtgtgtgtgtgtgtgtgtgtgtgtgtgtgtattttaagagatattttatttaatatggaaagaattttatgtagcgtttaagttggttttatgtcgtttgtatatatatatatatatataagtatattatatatatatatatttttaagtatgttggtgtgttaaatattatgtataaaatatttaggaaagtaaataatttgatgatagtttagtatataggaaagaaaatatttatataggatggttatatagattagtggttaagagtgtttggtgaatttcggttttattattgtgggattttgtgttttggtttttttatttggaaaatgtaggtttgtttattttagagagtgtaaagattaaatgagataattcggataaaggattagtgtagtgtcgagtatatagtaaatttttaataaatgtaggttgttgttattatttcgttaatatgttaaagaaaaaagaggttggattaaaagagtatttttaaaataaagttaaattatgttattagtatttttaggttaattgggattaaattggattttttgcgaaaaggtggaggggattaaatgacgtcgatcgttttagtaataggtttttaaagaaggtgaattttcgtagttaataagattttgtgttttggaggaggtagttaatggttgacggaaagagaaagagggaggacgcgttaatttttttgtttgagtttcggtttaataaaatggcggcggtagcggtgtcgttttgttttcgcggtttttgcggcggtggtagtggtagcggtttttgagttgtggggaggttttagtagtagttatagtgacgattaagattttagtgtatttttatcgtaatcgggcgcgggggagcgtagatcggcgtttagtaattatagaagtcgataaggcgtttaagcgaaaatatgatcgttgagtttatgaggtaaaacgtaatttcgttttatgggttttagcggtttgggtttaggtatcgtttgagtcgggtgtttgggaaggcgttcgtttggtgggttaggtttgtgtgttgtttagtcgaaagaggtatcgttttttttttaggtgagaagggtttcggggtatcggcgtaaggtttcgacgggggtgggggtggggatggggtggggggaggtggggggggcgcggtttagggtatggggcgttttttgtaattttttttaaacggtgacgtttggtcgggtttttttgtttattttttggtgtttgtgggattgagatttcgaagtcggaggcggtttttggtatttcggttatttttgttaatttttgggtttagaaattgcgtggggaagaagcggggggagggtgagaagagggggaggggtgggcgggcgcgaggatgtgagattttaggacgatttagaggcgtttaggttgttggagatgggaagtattcgggttttgcgggattttttttttgtagttttaggagataagtttttttttgattgggttgtggtgtagttttaggtatttaggtattttttttattttatattttgaaggatatttttgggtttatttttaggcgaggggggatttaatatagggttttgtttttagaggattttagtatattattttttgtgatgtttagttttaatgggattttaagtgtttttttattttttgggtaaatttcgaggagtaattaggttttatttttatttatttatttattttatgaaggatgaagggtaggttaacgtgggttgatgcgaagtaagatttattgtaagggaaaatgtttggtaggtttttttttaattaattaagtacgtttattaggttgaagttgtttttttgtgtgtttttgatttgttttttgacgggtttgaaaatttgggtagttaatatgaaatgtatatatttttatttaggtggttggttggcgttttagtttg

SEQ ID NO: 8 - DNA, 6020 bp, Artificial Sequence
  chemically treated genomic DNA (Homo sapiens)
taaattgaaacgttagttagttatttgggtaaaagtgtatatattttatattgattatttaaatttttagattcgttaagaggtaaattagaagtatatagaaaaatagttttaatttaataaacgtgtttgattggttaagaggaggtttgttaggtatttttttttgtaataaattttatttcgtattagtttacgttaatttgttttttattttttatggaataaataagtaaataaagatagggtttaattatttttcgaaatttgtttagaaagtggggaaatatttgaggttttattaaggttggatattataaaaagtagtatattagggttttttggaagtaaaattttgtgttaagttttttttcgtttagaaataaatttaaggatattttttaggatatggagtagaaaagatatttaaatatttggaattgtattataatttaattaaaaaaaggtttgttttttggggttgtagagaaaaaatttcgtagggttcgggtgttttttatttttagtaatttaaacgtttttaagtcgttttgggattttatattttcgcgttcgtttatttttttttttttttttatttttttttcgttttttttttacgtagtttttaggtttaaagattagtaaaaatgatcgggatattaaagatcgttttcgatttcgaggttttaattttataggtattaaagaataaatagaggagttcgattaagcgttatcgtttaggggagattgtaagaagcgttttatattttaggtcgcgttttttttatttttttttattttatttttatttttattttcgtcggagttttgcgtcgatatttcgaaattttttttatttaaagagaaaacgatgtttttttcggttaagtaatatataggtttaatttattaagcgaacgtttttttaaatattcgatttagacggtgtttgggtttagatcgttggggtttatgagacggggttgcgttttattttatgggtttagcggttatgttttcgtttgaacgttttgtcggtttttgtgattgttgggcgtcgatttgcgttttttcgcgttcggttacgatagaaatgtattggagttttagtcgttattgtagttgttgttggaatttttttatagtttaaaggtcgttattattgttatcgtcgtaggagtcgcggaaataaagcgatatcgttgtcgtcgttattttgttgggtcgaggtttaggtaggagaattggcgcgtttttttttttttttttttcgttagttattggttattttttttaaagtatagagttttattggttacggaaatttattttttttgggggtttgttgttaaggcggtcgacgttatttgattttttttattttttcgtagggggtttaatttagttttaattgatttgaaagtgttagtgatatagtttgattttattttgaaaatgtttttttggtttaattttttttttttttgatatattaacgaagtaataatagtaatttatatttattgagagtttattatatgttcggtattatattaattttttattcgggttattttatttaatttttatattttttgaggtagataaatttatattttttagatgaggaaattaagatataaagttttatagtagtggagtcgagatttattagatatttttaattattaatttgtatggttattttatgtaagtatttttttttttatatgttaggttattattaagttatttgtttttttagatgttttatatataatatttggtatattaatatgtttggaaatgtatatgtgtataatatatttatatatatgtatatgtgtgtagacgatataagattaatttgaacgttgtataaaattttttttatattgaataaagtgttttttagaatatatatatatatatatatatatatatatatatatacgggttatttttttaatttgatgtgatgtttagtttataaattaattaatttagatttgttttttttttattatagaggaagtttggttggatgatttgtaaatgtttttttcgtttttatgatttataatttgattttatattggtaatttttgttaattataaataagttttttaaaatttaatcgtttcgaaatttatttttaaatttattttgttatgtatgttttagtttattttatttattttttttgaaatatgtaagagtttttgtcggggttaggtgatagggttgttgttttttattgggatagtaagaggggagttttttttgaatgaaatattttgaaaatttgataggtttaggtaatttttttttttttttttttttgagatagggtttagttttgttatttaggttggagtgtagtggcgtgacgtagtttattgtagtttcgattttttaggtttaagtaatttttttattttagttttttaagtagttgggattgtaggcgcgtgttattaagtttagttaattatgtatttatgtattggtatagatgaggtaggtttgtttgttgtttaggttggttttaaatatttaagtttaagttattttttaatttcgattttttaaagtgttggagttataggggtgagttatcgcgtttggttttaggtaattttttaattaatagacgtttgtatatattgtaattatattttttaaatgtttgagtttagttggtaattatagaaattagatttttgtatttgttatattgattttgttttgtatatattaaatattattttaatatataatttataggagttatttttttttttttggtaaatgtagtgaatttgaatgatgtattttattataaggtagtatagaaatgtgtttgttgtttaattgattttattatgagaaaaatagtaaatagttaatatgttattaggttattggcgtttcgaataaggaattggataaaatgtataaagtaaggaaagaatgaagtaataaaagtagagatacgttgaaaatgaaagtatattttataagattgtaggagttgttagagtataggggtttaagatttttattatagaattttttgggatttaaatattttttagaggttttttattggttatttggtgtatattttatgtaaataaagtagtggttcgtaattagaggttaaagtgaagttataagggttatattttatgtaagtatttaattggttgtggatagtaattaattagaggttaaagtgaagttataaagttatattgttatataaatatttgttttttgtaattaattagagatatttttagttttttatttgttaagcggaaaaggaagaggatttgtaaagggagtagtttttttgttatttaggtgtggaaagttggggttttttttttgatttagttttaggaagttaattttatttagttttaggttttttgtttttaaattttatttttttgttttatattatttttaaatgaattgaaattattaaggtagaaattagttgttgttgagagattttttaatattaaatagttttaaatgataagttttataaaagaaatttaataataaaattataattataatttgtttttgttttgttttgttttgttttgtttttgagatggagtttcgtttttgtagtttaggttgtaggttggagcgtagtggtatgatttcggtttattgtaattattattttttaggtttaagcgatttttttgttttagtttttttagtagttgggattataggtatttattattacgattaattaatttttatatttttagtagagacggggttttattatgttagttaagttggttttgaatttttgattttaggtaatttattcgtttcggtttgtaaaagtgttgggattatagttatgagttattatgttaagtaattatagattttttaaattttaattttgttttgagatagggttttatttggttttttaggttggagtataatggcgtgattatgggttattgtagtttcgattttttaagtttaagtgatttttttattttagttttttaagtagttataattgtaggtttaagttattatagttcggttaattttatttttttgttttatttttttagagagtaggtttcgatgttgtttaggtttatgttttaaagtttagagtttaaattatttttttattataattttttaaagtgtttgaattataggcgtgagttattatgtttagtaataattatagtatttttaaaatgaataatatttgtgaatattgttgtgaataataatttgtgaatatattgtgaataataatttattatatttgtgaagtataagagaatatttgagtcgaatatggtggtttatgtttgtaattttttaattttggaaggttaagaagggaagatgggttaaatttagtagtttaagattaaattgggaaaaatagtgaggttttttttttaaaaaaaattttttttttatttaaaaaaaaaagaaaaagaggttaggcgcggtggtttatgtttgtaattttagtattttgggtggtcgaggtaggtggattatttgaggttaggagtttaagattagtttggttaatatggtgaaattttatttttattaaaaatataaaaaattagtcgggtgtggtggtgggtgtttgtaattttagttattggggaggttgaggtaggagaattggttgaatttaggaggcggaggttgtagtgaatcgagattgtattattgtattttagtttgggtaataagagtaagattttatttttttattttaaaaaaaaaagaaagaaagaaaaagaatttttttgttagtaaaggatggtcgataaagttttattgatatatatataggtgtatcgtttttagtgatgattattaacgggtttttattaattattttagaagaagtttattggtatatatttttatatttttttttaaattgttatagaaggtaatttagatttttttttgatttttgattataaatgcgtaatttgtgaatgtgtttatttgttttggaaggaataagagatatagtatttgaaagagagtaaattagttgagaaaatagttattttataatttttaatatatagttttggttgggtttagtggtttaagtttgtaattttagtattttgggaggttaaagtgagtggattatttgagtttaggagtttaagattagtttggttaatatggtgaaagtttgtttttattaaaaatatatatataaaaaaattagttgggcgtagtggtgtgtgtttgtaattttagttatttgggaggttgaggagggagtatcgtttgagtttaggagatagaggttgtagtgatttgagattatgttattgtattttagtttgggtaatagagtgagattttatttgaaaataaataaataaataagtaaataaatagttttaaaatttttattttatgttagaattataatttttgagtaatatttatgaaattttaaaatatatatattatttaatttagtaatttaatttttaggaatttatttaatagatatattttatagggataaaatgagatgtatataagattatttattgcggtattatttgtaatattaaaatattggatagttgggtatagtggtgtgggtttgtagttttaattatttaggaggttgaggtaggaggattgtttaagtttagaagtttaaggttattttgagtaatatagtgagattttatttttgaaaaaataaataaataaataaaaaaagttagttagttatggcggtttatttttgtatttttagtattttgggaggttgaggtgggaggattgtttgattttagtaggttaagattattttgggtaatatagtaagatatagtttttataaatatatatatatatatgtgtatatatatatatatatatatgaaatatagtaagatattgtttttataaatatatatatatatatatatatatatat

SEQ ID NO: 9 - DNA, 6070 bp, Artificial Sequence
  chemically treated genomic DNA (Homo sapiens)
gttataggaatacgttattatgttcggttaatttttttgtatttttagtagagatagggttttattatgttggttaggttggtttggaatttttgattttaagtgatttatttattttagttttttaaattgttgggattataggtgtgggttattgtgtttagtttattagatatattatattttgtttatttatttatttgttaatgaatatgtgggtgaaatatgttaatttttatttgttgtaaaaataaaatatattttttttttttttttttttttttgagatggagtttcgttttgtgttttaggttggagtgtagtggcgcgatttcggtttattgtaagttttattttttaggtttatgttatttttttgttttagtttttcgagtagttgggattataggcgtgtgttatgatatttggttaatttttgtatttttagtagagacggcgttttattatgttagttacgatggttttaatgttttgatttcgtgatttgtttgtttcggttttttaaagtgttgggattataggtatgagttatcgcgtttggttaaaatatattattgttaaataattttttaggttatttttttttatgggaaaatgtagagtaaattaatagatttttaatagtaaaatggttaaggaaaaagtaggatagagataacgtaaagatataaataatttattaaatgaataaagttattaatgttatttaggtttaaatagtattttttaaagtgagaggttggatatttataattcgataaagggtgatatttatttgatattgttgttgttttatatggttttaattattttattgtttttgtttttattgttttttaattttgtgtttttttttagtgttagttattgtggtaggttttgaagaatatttttatggagagtatattttgtagaggaagataggtatattaatagtattaatataattaatataaatgttgattgttgttatgggaaaatttaggagggatatataggtagatttggaggattaggtaaggttttttaattttttaatttttttaataatttgtagagaagttgttttgagatttgagagatgaatgagaggtatgatttggaggtaaaggttaggaaattggaaagattataaaatattttgaggaaatgataggaaaatggggatgagggatagatgatatatgagaggaagtagggatttaatcggagtttggtatttattttgaaggtaaatgggagttgttggaaggattttgtgttttttttttttttgagatagatttttattgttgtttagggtggagtgtagtggtgtgattttagtttattgtaatttttattttttatttggaaggtagatgttagcgtagggtggtgaaaggtttgtgtatttattttaattttaaatatatattttggttaggtaaggaggtttacggttgtaattttagtatttttggaggttgaggttggtagatcgtttaaggttaggagtttgagattagtttgggtaatatggtaaaattttatttttattaaaaatataaaaattatttaggcgtggtggtatgtgtttgtggttttagttatttaggaggttgaggtgggtgaattatttgagtttgggaggtggaggttgtattgagttaagatggtattattgtattttagtttgggtaatagaggtagattttgttttaaaaaataaaaataaattttaaaaaattgaaaaaatatatattttaatgattgtatgtatataatgattttatatataaatgatttatatattattttatttatattaaatgtttatataagatagatatgtaatttttagtattttataagatttttttgggagtttttttatttatttttgtttttaggggtaatttggtatgtattatatatttttttttttttttttttttgagatggagttttgttttgtcgtttaggttggagtgtagtggcgtgatttcggtttattgtaagtttcgttttttaggtttatattatttttttgttttagttttttgagtagttgggattataggcgttcgttattatgtttgattgatttttttgtattttttagtagagatagggttttatcgtgttagttaggatggttttaaattttttgatttcgtgatttatttatttcggttttttaaagtgttgggattataggcgtgagttattgcgttcggttttatatatttttttatttatttttttttgtgtttagtatagtgtttgagttttatttatattgtatgtattagtagtttatttttttattattttgtaatatagaaaaaaattgagaaaagttttgaaatggtttaaaatagattattggggttaggtatggtggtttaagtttgtaattttagtattttgggaggttaaggtaggtagattatttgaggttagaagtttatgattagtttggattatatggtgaaattttatttttattaaaaatataataaattagttaggcgtggtggtacgtatttgtagttttagttgttcgggaagttggggtaggaaaatcgtttgaatttgggaagtggaggttgtagtgagttgagattatattattgtattttagtttgggtgatagagtaagattttatttaagataaataataaaaaaatgattattgggtgttattgaaaaataaggtgtttagttgtttagtttatttttttaggatgtttgattttatgaagattttaaattttttattgtttttgagttatagaataattatataaattatagatattttttgtttatagaaatgtaaattgtggtcgggtacggtggtttatgtttgtaattttaatattttgggaggttaagataggcggattatttgaggttaggagttcgagattagtttggttaatacggtgaaattttgtttttattaaaatataaaaagttagttgggtatgatggcgggtgtttgtaattttagttattcgggaggttgagacgggagattttattgaatttgggagatggtggttgcggtgagtcgagtttgcgttattgtattttagtttgggcggttgagtgagatttcgttttaaaaaaaaaaaaaaaaaaagaaatgtaaattgtttttagtagaatgtaattgattattaagttgtggattttattagttttgttagtttttgtatatatttgtagttattttattattttttatttgattatgtgtgtggtattttgaattttttattgaagtagttgtaatttttttggatattttatttattaatgagttaaataaaatttttaatatttattttatatttgtattatatttgatattaaaattattttttaatagtagtatatagttatatgaataagttgtaatttatttatttatttattggtggatatttgggttttttttttttggttattatgaataaagttgttatgagttttttggtgaataaaggtatttattttttggggtaaatatttagaaatgggatttttggggtatagggtaggggtaaatttgattttagtagagattgatgtttttaaagtggttgtattattttatatttttattaatattgtatgagagttttatttttgtatttttgtaattaagggaattgttagtttttttattttagttattttatggagtgtttaatagtattatattttggttttaatttattatagaagatttttaggagggaggtaatttgaatagatttttatattttagaaaattttttttgcgtattatgtggagaatgattatttgtatattaaagtttatagtagtattatttataatagttaaaaggtgggaataattaagtatttatttatatggatgaatggataaataaaatgtagtatatatgtataatggaatattatttagttttaagaaggaagaaattttgatatatgttataatatagatgttttttgaagatattatgttaagtgaaataagttaattagaaaagagtaattattgtatgatttaatttatatgcggtatttcgtatttatagatagaaagtgtaatatcggttataaggggttgtgagaaacgggtaacggggagttattgtgtaataggtagattttttatttgggataatgaaaaagttttggagatggatagtggtgatggttttataataatgtgaatgtatttaatgttagtgaattgtatatttaaaaatggtgaattttatgttagatagattttattatatatataaagaggagggagggcgggagggaaggagagagggaaggaagtagagaggggagaagagaggaagaaaggaaagaaagtaagatttggtattatagggtttatattttcgcgtgttagtaataggttgaaatagaagtatggttttttacgtgtttatggaggtatttgagtgtgtgtttattttttcggtttaatgataatttgtatttgttcgtgtagaggggtacgggtgaaatagagattagtattattaaggggatggagaggagagatcgttaaaatatcgtagagatatatcgtcggagttaagagaatggggtgtagacgtttggtttggtttgtgggaattggtaagttttagtttttaaacgttcgggttttttaattcgttatagtcgggttttagttgtttattttttttaaagtttttatcgattttaaaatattaaaaataaagatttaattagtttcggaagttcgagatgtaatcgtagttatttgattttttcgttcggattttgattgggttttggagatacgcgtttttttcggcgttgtacggcgatttcgttttagtagtttgagggggcgggaatagatgttcgagtgcgatagtattggtcggtttttttaggaagtagttaatcggaataggtaagttttcggcgggaagtgagttagggtttggcgcggcggtcgtggttgcggcgcgggaagtttggattttggtttcgttcgttaggagtttgcgtgcgaggtgagtatcgcgcgcgtaattacgggtcggttcgtattgatttagttttgttttggcggttcggttcggagttggaggtcgttcgggttttttcgttttttgtattggttcgtttcggttcgttgagttttttagtttggttaatattttgggaggatagtagatatataaatacgtttttaaatggggaaatagaggttcggggcgggggcgaattttgttaaggtttttcggggcgtcggaggtcgagtatgggttaggatttggtatgttgttgtttatatattttagtgcgtaatatgatgttttgtatagagtaattttagtttagatttttggtattattattttcgtgttttttttgaggaataacgaaaatattttgtattttttttgtggttttttataattacgagttgggttatttttgtttttgagtgtttattgtgtgttatgtttttggtatttttgattttataattgtagttttacgatattttagtaaagcgaagtgtttaagaatattgtattagattgtttgggttcgaattttggtttttttatatttagttttgtgtttattgtacgttattgaaatattaagtgttttggttttcgtttgttatatgggggaaatggttttttttattttttggcgtttttgttaggattaaacgatttaatatatgtaataataaatgtttcgaaggttatttgttatatagtatatagtaagggttttgttattattatttagagaagcggatgaaattgtttttattttagatatggagaatttgaagtataaagaggttgttttcgtatagaaagagtatttggtgattaagtgttagagatataggatttgaattaagcgtttgattttaaagtatgttttataatattaggtttttttttatagtttttatttgtttttaggttatatagaattttaggtattttatggcgtgagatggagtaggtgattgatagttttttg

SEQ ID NO: 10 - DNA, 6070 bp, Artificial Sequence
  chemically treated genomic DNA (Homo sapiens)
taaggagttgttagttatttgttttattttacgttatgaggtatttaaagttttgtgtgatttaaggataggtgagggttataggagaaagtttaatgttgtgggatatattttaaaattaggcgtttagtttaaattttgtatttttagtatttaattattaaatgttttttttgtacggagataatttttttgtattttagattttttatgtttaaaatggggataattttattcgtttttttgggtaatgataatagaatttttattgtgtattatgtaataggtagttttcgaagtatttattattgtatatattaagtcgtttaattttaataaaaacgttaggaagtagaagagattattttttttatatgatagacgaaaattaagatatttagtgttttagtaacgtgtagtagatatagagttaaatgtgaaggagttagaattcgaatttaagtaatttgatgtagtatttttaagtatttcgttttgttgggatatcgtaaagttatagttgtaagattaagggtgttaggaatatggtatatagtagatatttaaaaataagagtagtttagttcgtgattatggaaggttatagaaaaagtataaagtgttttcgttgttttttaggagggatacggaggtagtagtgttagaggtttgggttgggattattttgtgtagggtattatgttacgtattggagtatatgggtaataatatgttaggttttagtttatgttcggttttcgacgtttcgggagattttggtagagttcgttttcgtttcgggtttttgtttttttatttgggaacgtatttatgtatttgttgtttttttaggatgttggttagattagaggatttagcgggtcgaggcgaattagtgtaggaaacggaagaattcgagcggtttttagtttcgggtcgggtcgttagagtagggttagattaatgcggatcgattcgtagttacgcgcgcggtatttatttcgtacgtagatttttagcggacggaattaggatttaaatttttcgcgtcgtaattacggtcgtcgcgttaagttttggtttatttttcgtcggaagtttgtttatttcgattggttgttttttggggaagtcgattaatattgtcgtattcggatatttgttttcgtttttttaggttgttggggcggggtcgtcgtatagcgtcgggagggacgcgtatttttaaagtttaattagagttcggacgggagggttagatgattacggttatatttcgggttttcggagttagttgggtttttgtttttggtgttttagagtcggtgaaggttttaaaggaagtaggtagttggaattcggttgtggcgggttgaaaagttcgggcgtttgagagttgagatttgttagtttttataggttaagttaggcgtttgtattttatttttttggtttcgacggtgtgtttttgcgatgttttggcggttttttttttttatttttttaataatattggtttttgttttattcgtatttttttatacgagtaggtgtaaattgttattgaatcgggaaagtgggtatatatttagatgtttttatggatacgtgagaaattatgtttttgttttagtttattgttgatacgcgggaatgtgggttttgtgatgttagattttatttttttttttttttttttttttttttttttttttatttttttttttttttttttttttttcgtttttttttttttttgtgtgtgtgataaaatttatttaatataaaatttattatttttaagtgtatagtttattggtattaagtatatttatattgttgtgaaattattattattatttatttttagaatttttttattattttaaatagaaaatttgtttgttatatagtaatttttcgttattcgttttttataattttttatagtcgatattgtattttttgtttgtaagtgcgaggtatcgtatataaattgaattatataataattgtttttttttgattggtttattttatttagtataatgtttttaaggagtatttatgttgtagtatgtattagaatttttttttttttgaggttaaataatattttattatatatgtatattatattttgtttatttatttatttatataaatggatgtttggttatttttattttttggttattgtgaataatgttgttatgaattttggtatataaataattattttttatataatacgtagaaagagttttttaaaatgtaaaaatttgtttaagttattttttttttgaaaattttttatggtaaattgaaattaaaatatgatattattaaatattttatagaatagttgaaatgaaaagattgataatttttttagttgtaaagatgtagaaatgggatttttatatagtgttgatgggagtgtaaaatggtataattattttggaaatattagtttttattgaaattaaatttatttttattttatattttagaaattttatttttagatatttattttaaaaaatgaatgtttttatttattaaaagatttatagtagttttatttataatagttaaagggaaaaaatttagatgtttattaatagatgaatagataaattgtagtttatttatataattgtatattattgttgaagaataattttaatattaaatataatatagatataaaataaatgttagagattttatttaatttattaatgaatgagatatttagaaagattataattgttttaatggaaaatttaaagtattatatatatagttaaatgaggaataatgaaataattataaatatatataaaaattggtagaattgatgaaatttatagtttagtaattaattgtattttattgaaaataatttgtatttttttttttttttttttttttgagacggagttttatttagtcgtttaggttggagtgtagtggcgtaagttcggtttatcgtaattattattttttaggtttaatagagtttttcgttttagtttttcgagtagttgggattataggtattcgttattatgtttagttagttttttgtattttagtagagatagggttttatcgtgttggttaggttggtttcgaatttttgattttaggtgattcgtttgttttggttttttaaagtgttaggattataggtatgagttatcgtgttcggttataatttgtatttttatagataagaagtgtttatagtttgtatagttgttttgtagtttaaagatagtgaaaggtttagagtttttatagaattagatattttagaaaagtaagttggatagttgggtattttgttttttaatgatatttagtaattatttttttgttgtttgttttagatggagttttgttttgttatttagattggagtatagtggtgtgattttagtttattgtaatttttattttttaggtttaagcgatttttttgttttagtttttcgagtagttgggattataggtacgtgttattacgtttggttaatttattgtatttttagtagagatggggttttattatgtggtttaggttggttatgaatttttgattttaggtgatttgtttgttttggttttttaaagtattgggattataggtttgagttattatgtttggttttagtaatttgttttagattattttaaagttttttttagtttttttttgtattataaagtaataggaggatgaattattggtatatataatatagatgaagtttagatattatgttgagtataaaaagaggtagataaaagagtatatagggtcgggcgtagtggtttacgtttgtaattttagtattttgggaggtcgaggtgggtggattacgaggttaggagatttgagattattttggttaatacggtgaaattttgtttttattaaaaaatataaaaaaattagttaggtatggtggcggacgtttgtagttttagttatttaggaggttgaggtaggagaatggtgtgaatttgggaggcggagtttgtagtgagtcgagattacgttattgtattttagtttgggcgatagagtaagattttattttaaaaaaaaaagagaaaaagagtatatagtgtatattaggttatttttggaggtagaggtagatgaggaagtttttaaggaaattttatggagtgttggaaattatatatttgttttatatagatatttaatatagataaagtaatatataaattatttatatataaaattattatatatatataattattgagatatgtatttttttaattttttaaaatttatttttattttttgagatagggtttgtttttgttgtttagattggaatgtagtggtgttattttggtttagtgtaatttttattttttaggtttaagtaatttatttattttagttttttgagtagttaggattataggtatatgttattacgtttgggtaatttttgtatttttagtagaaatggggttttgttatgttgtttaggttggttttaaatttttggttttaggcgatttgttagttttagtttttaaaagtgttgggattatagtcgtgagtttttttgtttggttaaggtatatatttaagattaagatgagtgtataagttttttattattttacgttaatatttattttttaggtgggaggtaaaggttgtagtgagttgagattatattattgtattttattttgggtagtagtgagaatttgttttaaaaaaaaaaaaaatatagaatttttttagtagtttttatttgtttttaaggtgaatattaaatttcgattgagtttttgtttttttttatatgttatttgttttttatttttatttttttgttatttttttaaggtgttttatagtttttttagttttttggtttttgtttttaaattatattttttatttattttttaggttttaggataatttttttgtaagttgttggagaagttgggaagttggaaagttttatttaattttttaaatttgtttgtgtattttttttaggtttttttataatagtagttagtatttgtattggttgtgttgatattattagtgtgtttgtttttttttatagaatatgttttttatgagggtgttttttagggtttattataatggttggtattagagaagggtataaaattgaagaatagtgaagataaaagtaataagatgattaaggttatgtgagatagtaataatattaggtgaatgttattttttatcgagttgtgagtatttagttttttattttgggggatattgtttgagtttaagtaatattagtggttttatttatttggtagattgtttgtatttttgcgttgtttttattttgttttttttttggttattttgttattaaaaatttgttgatttattttgtatttttttatagagaagggtagtttgaggaattatttaataatgatgtgttttggttaggcgcggtggtttatgtttgtaattttagtattttgggaggtcgaggtaggtagattacgaggttaggatattgagattatcgtggttaatatggtgaaacgtcgtttttattaaaaatataaaaattagttaggtgttatggtatacgtttgtagttttagttattcgggaggttgaggtaggagaatggtatgaatttgggaggtggagtttgtagtgagtcgagatcgcgttattgtattttagtttggggtatagagcgagattttattttaaaaaaaaaaaaaaaaaaaaaaggtgtgttttgtttttgtaataagtaaaaattgatatattttatttatatgtttattaatagatgaatgaataaataaaatgtggtatatttaataagttgggtatagtggtttatatttgtaattttagtagtttgggaggttgaggtgggtggattatttgaagttaggagttttagattagtttggttaatatagtgaaattttgtttttattaaaaatataaaaaagttagtcgggtatggtggcgtgtttttgtaat

SEQ ID NO: 11 - DNA, 6317 bp, Artificial Sequence
  chemically treated genomic DNA (Homo sapiens)
ttgatagtaagagatatgttaatattttgataatttttttttttttttttttttgaggttgagtttcgttttgttttttaggttgtagtatagtggcgtgatttcggtttattgtagttttttttttaggtttaagtaatttttttgttttagtttttcgagtagttgggattataggcgtatattattatttttggttaatttttgtatttttatttttattgtttttgagacggagtttcgttttgttgtttaggttggagtgtagttgtacgatttcggtttattgtaagtttcgtttttcggggtttatgttatttttttgttttagtttttcgagtagttgggattataggtattcgttattatgttcggttaattgttttgtattttttagtagagatagggttttattatgttagttaggacggtttcgattttttgatttcgtgattcgtttgtttcggttttttaaagtgttgggattataggcgtgagttattgcgtttagttaatttttgtatttttagtagagacggggttttgttacgttggttaggttgattttgaatttttgattttaggtgattcgttagttttagttttttaaagtgttaggattataggcgttagttatcgtttttagttgataatttttttttaaaggttatgaaataattagaattttttttaagtaaagatcggtttgtatggttttagtttatagggtttttttaagggttttgtattattttgtaaagtaatgattgtttgaaatttaaaaatagtattttatattatttgttaatttttatttagggtaatttaagtttttttaagagtaaaattataatgtagaattattttattaagtttttgaaaattttaatgtgtttttaatgataaaattttttttgtgtgagtagaaaataagttgattagaagtaaattattttattttataggatgtagaatggagatttatagaatagtgttatttgttgtgattttaagagaaataatgtgtatataatagaatataattataattaataagtaatggttgatataaaggtaatttaggaaatgtaaagattagttaatttatatagtattttataattaatgatatattgtagattttaataatttatagcgtggtaaaattattttgtaaatattgttgttatttatttgtatattgtaagtatattttattaatttttttattatggtttatatagtatagatagtatttttattggaggataattttttattagaaaaggatatttaaatgaatttttttaatagagggattaatatttggtagtaaggagtaaaagaaaaaaaattatattataaaaaaaaattaaaattataaaattaagtttattttattttagtaaatattgttataattgtgattatgttatattttttagaagaaatttattttttatgtgtaatttttttgataaaattatatgatagttatttgttaatatttttatttttgatttttgtagaataaataataaatgtttttgtaaaagtttttagaatttaagtaattttattaagtttaagtttttttattatttttttatgaaatattttaaatatatagagaaattgaaagagtattgttaataaatatattaatgaattagatttaataattgttaatattttgtcgtatgtatttaattattttaatttttttatgattaataattttaaagtatttataaatattataagatattttatttttaaatattttgatatgtatattttaagagtaaggataaattatatagatataattatattataatatttaagaaaattttataattttttaatattatttgaaaattaatttttttatttttatttattgtttaatgttttttatagttattttgttttgaattagattttaattaaagtttatatattgtatttggtttttatatagtgtttttgagttttttttatttttttttttttttttttattatcgtttttatagatttattgaggtataatttattgtaaaagttattattttggttaggtgtggtggtttatgtttgtaatttagtaattcgggaggtagaagttagaggattatttgagtttaagagtttaggattagtttgggtaatataggaagattttatttttataaaaaattaaaaaaaaaaaaattagtagggtgtggtggtgtatgtttgtggttttagatatttacgaggttgaggtaggagaattattttagtttagtaggtagaggttgtagtgggttttgattgtgttattgtattttagtttgggtaattaagtaagattttttttaaaaaaaaaaaggtcgttttttttaggggtatagttttaattaggaattttgataaatagatatagttatgtaattattatcgtaattaagatatagaatatttttagtatcgtaaaaagtttttttttatttttttatagtttttttttttttattttttttaatttttggtaattagcgatttgatttttttttatatagttattgatgtttagttttttttatttagtatagtgtttttaagatttatttatattgtatattagtagtttgtttttattgttgaagagtattgtattgtattgaggtatatttgtttatttatttattaggatagatgtatatgttaagttgtggggtgggaatgaatatagattaatttttaagtgttagtttagttgtgaatatttttgtgttaatatttaatggaagatattttggtagtaaatatttatattatagttatttgatggaaattaaagatttaaaataaaatattttttgaaatagttttaagatttataaattttaaattatgtatttaaaattataagtaacgaaaagttttttttattttttttttaagttaaatttttggatattttatgtttttatatatatatttaattatgtatatgttaatatttttatatattgatatgtaaatatatatatgtatatatattttttaattaggtaagtagttgtgaaagaaaattttaagattgttttagtagtttataagaagtaatttttgatgtattttggggggagatttataacgataaatttgggtttttaaataaatattattttttttattaattagtaattttattttaggatattaaaattatggtgggttattaagtattataataagtatatatggaagtaaaacgtttttttggaaattgtggagtttttataattgtttttataagagtattgttttattttttttagaatagttaatttttaacgttttttgtggtttgttttttgtagtagtataagttattgtattttaaattttttaaaataagtgtgggatttagtttttagtggaagtaggaggatataattttatatgtgggattttatatttataatcgtgtttgttaaaattttttatttagaggtaaagagtgtagtgattaagagtttagttgtggagtgagaatttttgggataataatttattttattatttagtggtgatgtgattttgggtaagatatttagttttttgtgttttagtgtttttgtttataaaataggaatattaattgttttttttaatgtatgtaaagtattttagaattgggtatagagtatgtagttaataaatgttagtgtttattattatttattttaaatgtgatagtattaaattataagttggattgattggtaaaattgttaaatatagtaaaaaattttttataatgattttaatagttttattattgaatttttattatgttttaaatattgtgtttagattttaataggaattatttaattataatattttaattattttaatagtatttttattttgtagataagagaattaaggaatagataatttagttgtttataatggtagaattaatggaatggagtgtaatttaggtttaattttagttagagattatagtttttttttttttattaaaaaaataaataaaataaaaaaattggtttttatagttgatagtatttgttaaagtattatatgttttaaaaatttattagtttaatttttgattaatgtatttatttaattagtaaattattttttgattagaatttttttgtaattttaaattaaataataaaataagatatagttttatagaattatatattggttaggtgagaagtttttagagcgtttaatttagatttttattttattattatggaaatatttagaatggtgtcgtaattttgttttttataatatagttagttaatggttggtaggttttaggattttgtatagaattttttttagtgtattatatttaaatgatagatatttacgtgggttatttgttggtaatgtattataaaaatatcgtttatatatttgaaaaagaatataagttattattattattattatatataattatttaattatttttagagatgatggttagatgggttgggcgtggttgacgaatttgtattagaaaaatttttttaaaaaaagattttattaaaaaaaaagtcgtttgtaatttttattttttatttttttaagtattatttattattttttaatagaattgttgagaagttttatattgggtataaggagcggtttttaggatcgtgtttttttaataaaagtttagtttcgcgtttgtttcgggcgcggcgttgaggaagggaggtgggaagagtagagcggttagaggtagggcgggcgggtgggtttgtaggttggagggtcgttggtttggagtatgaaggggcgagtttattaacggtttgttttttattggacggcgcggttcgttttgcgtatgtgttttcgggtttaaatttaggtataggttaagcgtttttgtttgttgagggcggagttaatggcgggggagtgttgttagcgcgcgtttttcggatcgtagttttcgcggtagtcgtttgagatttaaggttattgtttggtcgcggtttggtatttcggcgattcgttttttgttcggttttttggagttgtggttcgtgtgggtttttattttagatagttgcgttggtttagcggggtcggaatatggttgcgttcggtttggtaagtgtaggtttttcgttttaggcgagtggttgagcggttggttggggtacgggcgttcgaggttggggagaaggaaatgttaggttgaggttgtgatttttgagggattttagtgggaaagtcgtaggaatttttgaaattaagtgtgatcgtgtgtcgataattagagttaatttattgtatttttattattttttaagtttttatgtcgttatttcgtttgtgtttacgttttatttttgagaggtgtttgtgatttttgttgggtttttttttgtttttgtttttgagacggggttttgttttgttttttaggttggagtgtagtggcgcgattttggtttttgttttttagtttagttttagtttttaggtttttaaataatttttttttttatggtagaagtattgaaacgttttaaaagtgtgtttttgcgttatatttggtagttgggagaaatagattatgtaataagtacgtttcgaaataatttgacgtttttagtttttttgttaaaatggtggttttttatgtagtttttgaggttgatttatggagtatatgttattgataaatttttttgaaagatagttattagttaaaaggtataagttgtgaatgattaatgggggcgataatttattttgtttatatatttttggatttttttggtgtttattattttatattttatattttggttatggttattatataaaaattcgtattattttttttttaatttatttttttttttaagaaaatttttagtttcgatgattttttattatgtgacgttatatatataaatataaagagttgtatgaaagaataatataatttatattttttattatgagtatatatattgtttatattatatataattagaagaaagtaataaagttatttttattgtggggagagaagcggaataaagtttattagatgtttgtagtttagtttttaaatgtttgttataatttatgttatgttataatataattttaaaattgttttgagtttttaggagatgtttggtgtatagtatgtttatattggatgaagttattttgaaaataaattttattcgattttattttaaagaaattaaattgatgatttattttttttttagg

SEQ ID NO: 12 - DNA, 6317 bp, Artificial Sequence
  chemically treated genomic DNA (Homo sapiens)
tttgaaagaaaagtaaattattaatttggtttttttaagatagagtcgagtaaaatttatttttaaagtaattttatttagtatgggtatgttatatattaaatattttttaagggtttaaaataattttgaggttatgttatgatataatataggttatgataggtatttaaaaattgaattgtaggtatttggtaagttttatttcgtttttttttttatagtgagaatggttttattgtttttttttgattatatataatgtaaataatatatgtgtttatagtaaaaagtatagattatattatttttttatataattttttatgtttatatgtataacgttatataatgggagattatcgaagttgaagatttttttagaaggggagataaattagaaaagaaatgatacggatttttatatagtaattataattaaagtatgaaatatagaatagtgaatattaaagaagtttagaaatatgtaaataaaatgagttgtcgtttttattagttatttatagtttgtattttttaattgatagttgttttttagaagagtttgttaataatatatgttttataaattagttttaagaattgtataaaaggttattattttgatagaagaattgaaaacgttaaattatttcgagacgtatttgttatataatttgttttttttaattattaagtgtgacgtaaagatatatttttaaggcgttttaatatttttattatggggagaaaagttatttggaggtttaggaattggagttagattaaaaagtagaagttaagatcgcgttattgtattttagtttgggggatagagtaagatttcgttttaaaaataaaaataaaaaaaaatttagtagaaattataagtattttttaagagtaagacgtaggtatagacgaaatgacgatatgaaaatttaagaaataataaaagtatagtaaattaattttggttatcgatatacgattatatttgattttaaaaatttttgcggtttttttattgaaattttttagagattatagttttagtttagtatttttttttttttagtttcgggcgttcgtgttttagttagtcgtttaattattcgtttggagcggggggtttgtatttattagatcggacgtagttatgtttcggtttcgttgagttagcgtaattgtttgaggtggaagtttatacggattatagttttaggaagtcgagtaagaaacgaatcgtcggaatattaggtcgcggttaagtaataattttaagttttaggcgattgtcgcgagagttgcgattcggaaggcgcgcgttaataatattttttcgttattggtttcgtttttaataaataagaacgtttggtttgtgtttgggtttgaattcggagatatatgcgtaaaacgggtcgcgtcgtttaataggaagtaagtcgttagtgggttcgtttttttatgttttaggttaacggttttttagtttgtagatttattcgttcgttttatttttagtcgttttgttttttttattttttttttttagcgtcgcgttcgggataggcgcgagattgggtttttattaggaaggtacgattttgggaatcgttttttgtgtttaatgtaaaattttttaatagttttattaaggaataataagtaatatttggaaggatgagaggtagaaattgtagacgattttttttttaatagaatttttttttgaagagatttttttaatgtagattcgttagttacgtttagtttatttaattattatttttgaaaataattgaataattatgtataataatggtgatgatggtttgtatttttttttaagtatgtgggcgatatttttatgatgtattgttaataaatgatttacgtaaatatttattatttaagtatgatgtattgaaaagaattttatatagaattttgaaatttgttagttattgattagttatgttatggagggtaaaattgcggtattattttgggtgtttttatagtgatagaatggaagtttaaattagacgttttgaagattttttatttgattagtgtatgattttatgaagttgtattttattttattatttaatttaaaattataagaaaattttaattagaaaatagtttattaattgaataaatatattaattaggagttgagttaatagatttttaaaatatgtagtgttttaataaatgttgttaattatgaaggttaatttttttattttatttatttttttgatagaaaaaaaggaattatgatttttgattgaaattaggtttggattgtattttattttattaattttgttattatgggtaattaagttatttgttttttaatttttttgtttgtaaaatgagaatattattaaagtggttgagatgttgtaattgaataatttttgttaagatttaagtataatgtttggaatatagtaagaatttaataataaagttattggaattattatggagagttttttattatgtttggtagttttgttaattagtttaatttataatttggtgttgttatatttggaatagataatgataaatattaatatttattgattgtatattttatgtttagttttgaaatgttttgtatgtattgaagagaataattaatatttttgttttataaataagggtattgaaatatagagagttaagtgttttatttaagattatattattattaaatggtaggatgggttattattttaagaatttttattttataattgagtttttaattattatattttttgtttttgggtaagaaattttagtaagtacgattatagatgtaaagttttatatgtaaaattatatttttttgtttttattggaaattaagttttatatttattttgagaaatttggaatgtaatggtttgtgttgttgtagaaagtaggttatagagggcgttgaggattaattgttttaaagaaaatagagtagtatttttataaaaatagttgtggagattttatagtttttagagaaacgttttatttttatatgtatttgttgtagtatttaatagtttattatggttttagtattttaaaataggattgttaattaatggggggagtaatatttatttaaaaatttaagtttgtcgttataaatttttttttaaaatatattaaagattattttttatgaattgttaggataattttgaagtttttttttataattatttatttagttaaggggtgtgtgtgtatgtgtgtatttatatattagtatatggaagtattaatatatatataattagatgtgtatatgggaatataaagtatttagaaatttggtttgaaagagaagtaaaaaaaatttttcgttatttatggttttaggtatataatttaaaatttgtaaattttgaaattattttaaagaatattttgttttagatttttgatttttattaaataattatggtatgggtatttattattaaagtgttttttattaagtgttagtataaaaatatttataattgaattaatatttaaaaattagtttgtatttatttttattttatagtttaatatgtgtatttgttttggtgagtggataaataaatgtattttaatgtagtgtaatattttttagtaataaaagtaaattattgatatataatatggatgaattttgaaagtattgtattaagtgaaagaagttggatattaatgattgtatgaaaagaaattaaatcgttggttattaggggttgaggagggtgggggaaaaaagattgtaaaggaataagagggaattttttgcggtgttgaaaatattttatgttttgattacgatggtagttatatggttatatttatttgttaaaatttttagttagaattgtgtttttgaaaaaggcgatttttttttttttgagaaaggttttgtttggttgtttaggttggagtgtagtggtataattaaggtttattgtagtttttatttgttgggttaaaatgatttttttgttttagtttcgtgaatatttgggattataggtatgtattattatattttgttaatttttttttttttaattttttgtagagatgggatttttttatgttgtttaagttggttttgaatttttgggtttaagtgattttttggtttttgtttttcgaattgttgggttataggtatgagttattatatttggttaaaatagtgatttttatagtaaattatattttagtaaatttgtgagagcgatgataaaagagagaaagagaaaatgagagagatttaaaggtattgtatgaaaattaaatgtaatgtgtaaattttgattagagtttagtttaaaataaagtaattgtaaagagtattaagtaataagtgaaaatgaaaaaattaatttttagatgatattagagaattgtaaagtttttttaggtattataatgtgattatgtttatgtaatttgtttttatttttaggatatgtatattaaagtatttagaggtaaaatgttttgtgatatttgtaagtattttgaaattgttaattataaagagattgagatagttaaatatatacggtaaaatattaataattattgaatttagtttattggtgtgtttattaataatatttttttagtttttttgtatgtttgaaatattttatagaaaaatgatggggaaatttgaatttaataaaattgtttaagttttaaaaatttttgtaaaaatatttattatttattttgtaaaagttaaaagtgaaaatattagtaaatgattattatataattttgttagaaaaattatatatgaaaaatgaattttttttaaaaagtatagtatagttataattataataatatttgttaagataaaatagatttagttttatgattttggtttttttttataatgtaatttttttttttttattttttattgttaaatgttggtttttttgttaaggagatttatttaagtatttttttttgataaaaaattattttttaatagaaatgttatttatgttatgtagattataatggaaaagttaataaaatgtgtttgtaatgtataggtaggtggtagtaatgtttataaaatagttttattacgttatgagttgttaaggtttgtaatgtgttattaattgtaaagtgttatataaattaattgatttttatattttttaaattatttttgtgttaattattgtttattagttatagttatattttattatgtatatattgttttttttaagattataataaataatattattttgtagatttttattttgtattttataagataggatagtttatttttagttaatttattttttatttatataaaggaaattttgttattgaaaatatattaagatttttaaaagtttaataaaatggttttgtattgtaattttatttttgagaggatttaaattattttgagtgaaaattggtaagtaatgtaggatattgtttttaaattttaggtagttattgttttgtaaagtagtataggatttttaaaaagattttgtaagttgaaattatgtaaatcgatttttgtttgggaaaaattttgattgttttatgatttttaaaaaaaaattattagttggaggcggtggttaacgtttgtaattttagtattttgggagattgaggttggcggattatttgaggttaggagtttaagattagtttggttaacgtggtaaaatttcgtttttattaaaaatataaaaattagttgggcgtagtggtttacgtttgtaattttagtattttgggaggtcgaggtaggcggattacgaggttaggagatcgagatcgttttagttaatatggtgaaattttgtttttattaaaaaatataaaataattagtcgagtatggtggcgggtgtttgtagttttagttattcggggggttgaggtaggagaatggtatgaatttcgggaggcggagtttgtagtgagtcgagatcgtgtaattgtattttagtttgggtaatagagcgagatttcgttttaaaaataataaaaataaagatataaaaattagttaggagtggtggtgtacgtttgtaattttagttattcgggaggttgaggtaggagaattgtttgaatttgggagagaggttgtagtgagtcgagattacgttattgtattgtagtttgggagatagagcgagatttagttttaaaaaaaaaaaaaaaaaaaaattattaaaatattaatatgttttttgttgttag

SEQ ID NO: 13 - DNA, 6113 bp, Artificial Sequence
  chemically treated genomic DNA (Homo sapiens)
ataaaaataaaattgtttttatttatagttgatataattatttatagagaatgtttaaaggatttgtaaaaggttttatttaagaattagtaggtgagtaaaataggttgtaagatatatgtttaatatggaaaaatttattgtattttaatataatagtaataaagaattagaaattacgttttttaaagtattatttataataataatataatataatatattttataataaatttaataaaatatattatgatttttatgttgaaaattataaattagtgataaatttttaaaaatgattaagtaaaaggtttttgtgaattaagttaaattgattttgatattaaattttatttttttaaatgttacgttatttaatttgttttttttgagtagtaaaaatattttgtgaggttaagtaggtattgttattttcgttttatagagtaagttggagttgttatggttaagtatttatatttttaggtatgtatttatggaaaatgaaaatttatgtttatacgaaatttatatgtgaatgttttttgtagttgtatttataattattaaaaattgtaagtaattaaatttaaatgttttttaatgagtaaatgaataaattggtatatttattaatatggaatattaattagtagtaaaaaggagtaaattattgatatacgtaatgaattttaaaggtattatgttgaatagaagaagttaggtttaaaaggttatatatggtataagtatatatgtgggatagttttaaatggaaaaaagtataatggtagagaataaattagtggttgttgaggttagggatgaggagagattgtaattataaaaaggtagtatgagggagttatttagggtgacggaattgttttgtattttgattttggtgttggttatattaattatatgtgtttaaatttatagaattatatattaattttaaaagttaattttattgtattttaaaaatagaatttaaaaaaattaattaatagtaaatagaaaattaaagaaaaaaaatgagatattataatatatttattagaagagttaaaattaaaaagattgattatattaagtgttgataaggatataggataattggaaattttatatatttttggtgggaaggtaaaacggtattattatttaggtagttttttaagaagttaaatatatatttaataagttgatttagttattttatttttaaatattatattaagagaaataaaaatataagtttatataaagatttatatatgaatgtttataatttatttgtaataatttttaattagaaataatttaaatatttatgaataggtgaatggataaataaattatggtatatatatataatggaatattatttagtattaaaaagaaataaattattgataaatataaaaatatggatgaattttaaaataattatgttgagtgaagaatttaaaaaataaaaaaaaaaaaagtagaatatgtgttgtatgtttttatttaaataaaattttagttaggcgtattgttttatatttgtaattttagtattttgggaggtcgaggtaggtagattataaagttaggagtttaagattagtttaattaatatggtgaaatttcgtttttattaaagatataaaaagttaattgggtagggtggtatatattttagttatttgggaggttgacgtaggagaattatttgaatttgggaggtagaggttgtagtaagtcgagatagcgttattgtattttagtttgggcgatagggcgagattttattttaaaataaataaataaaaataattaaataaaaattataaaaaatataaattaatgtatagtgttagaaattagatgagtgtttatttatggaagtagaagtataaggtaagattagaaaggagtataataaattgttgtggatattgaatatgttaatttttttgattgtgttgatggttttatagatatatatatatgttaaaatttattaaattatatattttaagtatgggtaattttttttgttaattatattttaataaaatttttaaaatgtaattataattatgtaagaaaatatataaattagtgagaatatgtaaaaataaaatatttatgttattgtagaatagatatgattgttaatttgaaattttaatggtattgtatttttatataaatgaatgatataaaaattggtataaatatatttgtttgttgttttttgggtttgtttttttttttttttttgaggtggagttttattttgttatttaggttggagtgtagtggtgtgatttcggtttattgtaatattcgttttttaggtttaagtgatttttttgttttagtttttcgattagttgggattataggcgcgtgttattatgtttagttaatttttgtatttttagtagagatggggttttattatgttggttaggttggtttggaatttttgattttaggtgatttatttatttcggttttttaaagtggtgggattataggtatgagttatcggatttagttataaatggattttttaatgggtaaaaggtttgaataatattttatcgaagatttgtagatagtaaataagtatatgaaaagattgttaatatttttaggtattaggaaaatgaaatttaaaattataatgagatattattatatatttattaaaatggttaaaataaaaataaaaatatatttaaaaattagataatattaagtgttggtgagggtgtggaaataattagaattttaatgtattgttggtaggaatataaaatggtatagttattttgaaaaatagtttggtagttttttataaagttaaatatatattgattatataatttagtaattttattattagatatttatttaagagatatgaaaatttacgtttatataaattttgtatgggaatgtttgtagagtttttgttataattatagaaattggaaatattttaatgttttttagtttgtgaatagataaattggtaaatttatataatggaatattattgagtaataaaaaggaataattattgatatatggatgaattttagttatattatgttatgtgaagtaagttagatttaaaagtttaaattttgtataattttatttatatgatattttagaaaagataaaattataggtttataaaatatattagtagttgttaaagggtgtgggaatgaattattaaggagttggaggaaattttgatggtgatggaattattttattatttgaatttagtgaggttattttatttatttgttaaaaataataaaattgtatattataaagggtgaatgttattgtatgtaaattatattttaatttaaaaaaatttagtttgatagtttgtatatttttaattttattgataatttatggaaaagaaatatttttttgtttgtaatttgttaagaaatatttaatattatgttatgttttttgtaggtttttttttttttttgtgagatatattttttgtttgatagaggagtttattagggaaataagtttaaatattaaaataagttatagaaaaaggttaggtaaaaataaattaattgagtgataaattatagaatatattttatatgtgtgggaaatgaatggtatataattttggaaaggttttagtgttttttaatattgttgattttatattatttttaatttttaagtgaggatgatgagatttggagaggataagtatttttttcgtgattttcgagttattaggtgttaaagttgagattttaatttacgttttttcgtttaaaatttgatattttttgtatgcggcgatggaataatatagaagaggttacgacggcggttatatagtgtgattttaatggatagtatcgtttttttattttttaaataattcgtttaattatttggtacgaattttatatagtaatattatgattattgttacgttttttaaattgagtttaacggggttttggaatgttaattttcgagaaaggaattagcgagttttgtggggatatggatttatttttgataagttttggtagtaaggaaggcgtatggggttagcgtcggagttagggtgttatcgaaaagggtaaatattaagaaagaagatagtcgaggcgttgaagatatttttttttaattatattatttagttttgggttataaggcggggaatagcgtacgaaaaattttttttttggtttttttagtttttttggtgaaagattttcgtggatttttttttgttttcgtcgttagtttagggttaaaattgaggtttttttataggcgtggttgggaggaaagtggtggtgcgttttaatagcgtaagtagttcggggtacgtcgggggaaggcgttgggtagtagggatcgcggacgtacgaggtcgggttaaggcgtttagagtcgggtcgggtagggtttcgatgttagagtgaaggggtcgataggggagaacgaattcgggaaatttttttcggtgatattttaagtgtcgtatgatgcgttagttgattaggggtttttattttttttttttttattgatttcgtaattattgattacgtaatcgttgtttacgtcgttattttatttttttagtttttgtattgcgggatgtagtagtatttgttttcgaattggttcgtgtttacgtgtttttttattttttttgatagcgatttttataaggcgcggaataaattttgagattaatttatgtcgtttatttagtttttagcgttgttagtagcgggattcgtagtaggggtaatgttttagtcgtcgatttagtttatcgaggcggagaagttaggtcggtttttattttggagtttttttagtaacggcgtttattattggtcggatatattatcgattgattaatgggagattttgttgttttagtttcgtttttgagttttgttatggcgacgtttagtgttttagtcggtgtgaggatacgatatgttggggtttttgttcgtacgttaaacgggtttggaggatttttttcgttttcggagagtagagttaatacggaggtaaagaaaattttattttttggttaataggttagttagaatttggattaatgattgtaagttttgttttatattttttcgttttatcgtttttttgttattaaattattatttgttttttaatgttgtgtggtttgttaaaataggattttttttatttattggtaataatttgtaggcgggggggcggcgggggtgggggggggtttttcgggggtggggggggttttttcgcgggtttaggtgaagatattataaatttaaataagaatatttcgttgtattgtatttttttttttttaagttattttaaagaataattgttttttacggattcgtttatttatttagtttgtatatttagtgaatttttatagtgtgttaggtagtttattaaaggtagaggatataggttaggaattgaataaagtttagaatgattagagcggagaattggggtagggattattgataagagatgaagtagatagaaattagatgaggaagagttttgtgtatttgagtagaggtgtgaagatgagaataaggtaatagttattgtattttgttttttgtttggagaatgggttgtaattgagaataagagtgggagttaagttaggtaattgttgtgattatatttgttcgggagagagttgttggaagtttgggttatagagttgttaagtagaataaagatagtggagagatttgaataacgtttgagaaatagaattaataggttatggaaattgagtggatacgtgaatgataaaaagagaagaatgaataatgatttttagatttatgttttgtataagaagttgaatgttggtaatatattttgagagagggttttttaaagggaagaagtaagttgtatttttaattttgtttatattaattgaggaatttgtgaagatatttatttggagaatatagttgtttatgagttttgcgttttggagaaatttaaatattagtttttaatattttattt

SEQ ID NO: 14 - DNA, 6113 bp, Artificial Sequence
  chemically treated genomic DNA (Homo sapiens)
ggataaaatgttggaaattaatatttaaatttttttagaacgtagaatttataagtaattgtgttttttaagtaaatatttttataggttttttaattaatgtgggtaaaattaaaagtataatttgttttttttttttggaaaatttttttttagagtatattattaatatttaattttttatataaggtatagatttgggaattattatttatttttttttttttgttatttacgtatttatttaatttttatggtttgttgattttattttttagacgttgtttaaatttttttattatttttattttatttggtaattttgtggtttaggtttttaataattttttttcggataagtgtaattataatagttatttaatttggtttttatttttgtttttagttgtaatttattttttaagtagaaaataaaatgtaatagttgttattttatttttatttttatatttttatttaagtatataaggtttttttttatttagtttttgtttattttattttttgttaatggtttttattttaatttttcgttttagttattttgaattttgtttaatttttggtttgtgttttttgtttttaataggttgtttggtatattgtaggaatttattaaatatgtagattgaatgaatgaacgagttcgtggagggtagttattttttggagtaatttaagagagaaggaatatagtataacgaagtatttttatttaggtttatagtgtttttatttgagttcgcgggggaattttttttattttcggggaatttttttttattttcgtcgttttttcgtttgtaagttgttattagtaaataaaagggattttattttagtaagttatatagtattagagggtaaataatagtttggtggtaggagagcgatgagacgggaaagtgtggggtaaagtttatagttattggtttagattttaattggtttgttagttaaaaagtaaggttttttttattttcgtgttgattttgtttttcgaaggcgaagagggttttttaaattcgtttggcgtgcggataaaaattttagtatatcgtgtttttatatcggttggagtattggacgtcgttatgatagagtttaggggcgggattggaatagtagagttttttattggttagtcggtgatatattcggttaatggtgagcgtcgttattagaagggttttaggatggaggtcggtttgattttttcgtttcggtgggttgggtcggcggttggagtattatttttattgcgggtttcgttgttggtagcgttggaaattgggtggacggtatgggttggttttaggatttgtttcgcgttttgtggagatcgttgttaagggaagtgaaagagtacgtgggtacggattaattcgggaataaatattattatatttcgtagtataagaattggagaggtgaggtggcggcgtgggtagcgattgcgtggttagtgattgcgaggttagtaaaggaaggaaaagtgagagtttttagttaattaacgtattatgcgatatttagggtgttatcggagagaatttttcgagttcgtttttttttgtcgatttttttattttggtatcggagttttattcggttcggttttgggcgttttggttcggtttcgtgcgttcgcggtttttattatttagcgttttttttcggcgtgtttcgggttgtttgcgttgttaaggcgtattattattttttttttagttacgtttgtagaggagttttagttttagttttggattggcgacggaggtagggaaaagtttacggaaattttttattaaaggggttagaagggttaggggaggggtttttcgtacgttgtttttcgttttgtgatttagagttgagtggtgtaattgaagaggagtatttttagcgtttcggttgtttttttttttggtgtttatttttttcggtggtattttggtttcggcgttggttttatgcgttttttttattattaagatttgttagaagtaggtttatatttttataaggttcgttgatttttttttcgggagttgatattttaagatttcgttgagtttaatttaagaaacgtggtaataattatggtgttattgtgtaggattcgtgttaagtagttgagcgggttgtttggggagtaaggaggcggtgttgtttattgaaattatattgtgtagtcgtcgtcgtaattttttttgtgttgttttatcgtcgtatgtagaaaatgttaggttttgggcgaagaggcgtgggttagaattttagttttgatatttgatagttcgggaattacggaaaaagtatttgttttttttaagttttattatttttatttgaaagttagagataatataagattagtaatgttgagaagtattaagatttttttaagattatgtgttatttattttttatatatataaaatgtattttgtgatttattatttaattaatttatttttgtttggtttttttttgtaatttattttaatatttagatttgtttttttaatgagtttttttgttaggtagggaatatgttttataaaaaaagaaaaaagtttgtaaagaatatagtatggtgttaagtattttttgataggttgtaagtagagagatgttttttttttataagttgttagtaaaattaaaaatatgtaaattgttagattgagtttttttaaattgaaatataatttatatatagtaatatttattttttatggtgtatagttttattgtttttgataaatgagtagagtaattttattggatttaagtaatagaataattttattattattagaattttttttaattttttagtagtttatttttatattttttggtaattattgatgtgttttatgggtttatagttttgttttttttagaatattatataaatggaattatataggatttagatttttgagtttggtttgttttatatagtataatgtagttgagatttatttatgtgttagtagttgtttttttttattgtttagtagtattttattgtatgggtttgttagtttatttgtttataagttgaaggatattaggatgtttttagtttttgtgattgtgataaaagttttataaatatttttatataggatttgtgtgaacgtaagtttttatattttttgggtaaatatttagtagtgggattattaagttgtgtgattaatgtgtgtttaattttatgagaaattattaaattgttttttaaagtggttgtattattttgtatttttgttagtaatgtattaaaattttagttgtttttatatttttattagtatttagtattatttgatttttgggtgtgtttttatttttattttagttattttgataggtatatagtggtattttattgtgattttaagttttatttttttaatgtttgaggatgttgatagtttttttatgtgtttatttattatttatagattttcggtgaagtattgtttaaattttttgtttattaaaaaatttatttatggttgggttcggtggtttatgtttgtaattttattattttgggaggtcgaggtgggtggattatttgagattaggagttttagattagtttggttaatatggtgaaattttatttttattaaaaatataaaaattagttgggtatggtggtacgcgtttgtaattttagttagtcgggaggttaaggtaggaaaattatttgaatttgggaggcggatgttgtagtgagtcgagattatattattgtattttagtttgggtgatagagtgagattttattttaaaaaaaaaaaaaaaaataagtttaaaaaataataaataaatatatttatattagtttttgtattatttatttatatagagatataatattattaaagttttaaattaatagttatgtttattttataataatatgaatattttatttttatatatttttattaatttgtatatttttttatataattgtaattgtattttgagagttttattgaagtataattgataaaaaaaattgtttatgtttaaaatgtataatttggtaagttttgatatatgtatatatttgtgaaattattaatatagttaagaaaattaatatatttaatatttataataatttgttgtgtttttttttagttttgttttatgtttttgtttttatggataggtatttatttgatttttgatattatatattagtttgtattttttataatttttatttagttatttttatttgtttattttgagatggagtttcgttttgtcgtttaggttggagtgtagtggcgttatttcggtttattgtaatttttgttttttaggtttaagtgatttttttgcgttagttttttaagtaattgagatgtgtgttattttgtttagttaattttttgtatttttagtagagacggggttttattatgttggttaggttggttttgaatttttggttttgtgatttgtttgtttcggttttttaaagtgttgggattatagatgtgagatagtgcgtttggttagaattttatttaagtggaagtatatagtatatattttgttttttttttttttgttttttaggttttttatttagtataattattttgagatttatttatgtttttgtgtttattagtagtttatttttttttaatgttgagtaatattttattgtatgtatatattataatttgtttatttatttatttgtttatagatatttgggttgtttttagttaggggttattataaataaattatgaatatttatgtgtaagtttttgtatggatttatgtttttattttttttgatgtaatatttagaaatggaatggttgagttaatttgttaggtgtatgtttaattttttaagaaattgtttaagtggtggtatcgttttatttttttattaggagtgtatgagatttttagttgttttatatttttattaatatttggtatggttagtttttttaattttagtttttttagtaggtgtgttgtggtattttattttttttttttagttttttgtttgttattagttggtttttttagattttatttttaaaatatagtaaaattaatttttaaaattggtgtatagttttataaatttgaatatatgtgattgatgtaattaatattaaaattaggatatagaatagtttcgttattttgaataatttttttatgttatttttttgtagttataatttttttttatttttaattttagtaattattgatttgttttttgttattatatttttttttatttgagattgttttatatgtatatttatattatatgtaattttttggatttggttttttttatttagtataatgtttttgagatttattacgtatattagtagtttgtttttttttattgttgattagtattttatgttaatggatgtattagtttgtttatttatttattaaagggtatttgagtttagttatttgtagtttttggtgattatgaatatagttgtaagaaatatttatatatgggtttcgtgtgaatataagtttttattttttatgagtatatatttaagagtgtgagtgtttggttatagtagttttagtttattttgtaaaacggaaataatagtatttatttagttttataaagtatttttgttatttaagagagataaattggataacgtagtatttaagagaatgggatttaatgttaaaattagtttgatttaatttatagagattttttatttggttatttttaaaaatttattattgatttgtagtttttagtatagagattatgatatgttttgttaaatttattataaagtatattatattgtattgttattataaatgatgttttaaaaaacgtaatttttaattttttgttattattatattgaagtataatagatttttttatgttgagtatgtattttgtaatttgttttatttatttattagtttttgaatgaagttttttgtagattttttggatattttttgtaggtaattatattaattgtggatagagatagttttgtttttat

SEQ ID NO: 15 - DNA, 5314 bp, Artificial Sequence
  chemically treated genomic DNA (Homo sapiens)
tttagtttatttttttcgatggaagagtggtttcggacgtatattttttttatgttggtgggagtagtggtaggagtagtggtagcgagtaggataggcggttgtttttttatttaaggattttgttattaggattcgtacgtttttttggttttggggatggggtatttgtgttttatggtgggtttttttgtggatatatttaggggttttggagtatttttgggtagtttgatagagtcgggaggtgtttttttattttttattttgatttggagaggtgaatgggattttggttgttgttcggatttgtgtgttgagggtttagtgtaggttgggtttagggtgtggtttagagtagtaggtttttttttttggagttagtagtttttggggtttttggataggggtaggttttggggtttaggtttagatgttttttttaggtggtgggtatattaaagaggttatcgtggttgttgaggcggagttgggagacggtgagatggtcgaggtttcgggtagttttcgttagtaggggttggggttcgtaggggagggtgagtaggtttaggtgaagttattggtgaataaggatggtcgttatgtgtgtgcgttgtgttataagatttttaagacggtgagtcggcgtgcggggagttagtgtgtgggtggtaggtttttttttgtttttttaggagggttttgagttgttacgtttttttttatagggtagtatttttaaggtttatatggttatttatagtagtcgtaaggattacgagtgtaagttttgtggggttttttttcgtattaagggtttatttattcggtattatcggcggtatacgggtgagttggtcgtatttcgggttggagttcggtagtatttcgatggttggttttggggtgttttagtttcgtattttttagttttgggggatgaggcgggggtttttgtttgttttcgttttgttattttgtcgttagtttgttggggttgttcggggttgattaggttttttttgtagatgagcgtttttataagtgttttaagtgtggaaagagttttcgggagtcgggtgtattgattcggtattttaagttttttattttttgtatagagaaaattcgttttagtgtgagtaaggacgtggttgttagtaaagaggacgtacgtgtaggttagtatggtgcgggtagttgtttggttttgggggttggttgtggacgtagtcgttattggggtgtgtgagggatttttatttttttattttattttgaaggttttggagttggagttgtcggtttggggatagttatattatcggtgataggcgagtttatagagattttattcgtgatttatttggtgatagatgttaagggtatcgttatttacgaagtttacgtttagatgtaggagttgtttttgggtatgaaagttttggttttagaggtgggggcgacggggggtttcggagggttgttttgttttttgtttgttcggtgttagtttttgttttgggtattggttttaggggtttgagttaggtaggcgagggttgggttttttatagggagagtagggttagtgggagcgttatgggggtttgagggtttgtataaggtttttggcgtgcgtttgttttatggggtgggtgttggatgttaggttgtttggttagttttttttttttgttttttttgtagtttttcgttttttaggagtttttttgttttagcgagggtagtcgtgagaatttgttgtattaggttatgtagaatttcggtatcgtttttgagcgcgttgttggggaggagggtgttttggagttagtttttgttgtcgggtttagtttttagtttttggtagtggtagtttcgtagttgtcggtattggaagtgtagtcgttggagatagtaggtgttagtattatttgcgggttttttttagggttggattttaggggttgtttttacgttggttttcgtttttttgaagtggttttttgtagtgattttgtttattgatttgtttattgttttttttggggttataagggagtttgttagggtggggtttatggttgtgtttttggtattgttagggtatagtttgtttcgggtgttggagatttttttgtggttttttagtaggtggttagcgaggttttagcggtgtttaggatttatttatgtttttagtgtagtgagattttttcgatagtagttattttggaggtttataagaggggttatatcggtaggtgatgggtgggtgtgtggtttatggtagtggatgggttataggtggtcggggtgtttttgggtgtttagggtgggtttatagatagtagggagttaggggatttgtgggtaggtggtaggcggtttggcgggttcgcgggtgatgggtttggtttgatgttgtgtgtggttgtagggtcgaggtcgttcgtttgcgcgtagtgtggtaaggttttttttaaggtttatttgtttaagaagtattaggaggtgtacgtgcgtgagcgtcgttttcgttgtggcgattgcgggaagttttataagattattgtttatgtgcgtggttatcggcgcgtttatttagacgagcggttttatttttgttttaagtgtggtaagcgttataagattaaggtgggtttttggtcgtaggattttggcgtttgatttttttattttgttttttggtcgtggtttaggtgtatttttttttttgtttttattatgtttagttttgatttagttttttttttgggttataggcgggaggggagagttgtagtttgttgtggttaaggttaggttggtattgataggtgtttttatagaacgtatagtaggtgtattttaggatatatttggaggagaagtcgtacgtgtgttagttttgtagtcgtggttttcgagagaagggtttattggtgcggtacgtgcgatattatataggcgagaagtcgtttaagtgttataagtgcggtcgtggtttcgtcgagtacggtacgttgaatcggtatttgcgtattaaaggtttgggtcggtggaggtgggagggggaggggagggggtcggggtttgtttagttttgatcgagtttttatttatagggggttgtttgttggaggtggaggagttgttggtgtttgaggatagtttcgcggtagttattatcgtttttacggaagattcgtatatagtgttggtggagttttcgttcgtggtagttgatatttaggagtatattatcgaggtgggtgtggggttttggggtcgtgttgggatttaggggtagttaaggttgatttttgtttttttgtttatttgtttaggttattgcggacgatgcggagattagtgaggttacggagattatcgagggtatttagatagaggtgaggggtagggtaggcgggggcggggaggttttttggtatagtcgtttttgttgagtcgtggttttgtaggtggatagttatattatgaaggtggtgtagtagatcgtgtattaggttagcgtcggttattagattatcgtgtagaacgttattatggacgaggagacggcgttgggtttagaggcggttgtcgtcgatattattattatcgttattttcgagagtttgatagagtaggtggttatgacgttggtttcggttattagcgagggtattgtgtttgtcgttcgggtagggataagtggtattgaataggttattgtgattatggtgttattagaggatatcgagattttggagtatgtaggcgagttggttatcgtttcgtcggagggttagttggaggtgtagacggttatcgtttagtatgaggtttgcggggttttggtcgggtagggatagggtagaggattttgagcgttttatttatgtttgtttggtttggtagagaagatggtataggatggaggcgttttaagacggatagtgtatataagagttttttgttgttttataataaaatatgagaatttgtagtttgtgatgttgtggtagtggtagttttcgcggttggtgttattatttttgtttaggttttcgtagtagtatttgttttttaggttatttttagatttacgtgtttggtcgttttatttaggggtttttgttagttttggcggcgttttggtgttgtgtgggtgttattggtatgttgattaatagttttttgttttgtttagttggagttgtgtttttagttgcgttgtttgaggtttgtgggtgggtgggaggattagggacggggatagggagatttgggagtttcggtttttatcgtagggtgagtaggtggagtagtagtaggagatgttgggtagggagtgtggttggttttatttgcgttgttttgttttttttgaagggattttgtttagggaggtagagtttaggcgatttaatttttaggggcgaggataagaatatagtcgtatcgggatgtggttgatcgtttattttttttttagggggttggtaggggtttttgggacggttttgggataggtttggggtattagaatcggtttaggtaggttttttattttttattttgggggtttttatgggaatgaaagttaggagtttattaggtatttagttgagtcgagggggcgggatttagtgtagttcggtttttttttggtttaggattttaaatatcggtttttgttttggtgttagagttattgttagagggagttagtgtagttttgtgtcggatacgttcgtagtttggattcgggatttttatttttttaggatttttgagtttcgggtttttgtatttatatttaaggtgagtttttcggttgttttgagttggggttggatgggtcggattttttatttcggttgtagtttttcgcgtagtgagaaggtagcggtttttgagagtttagtagtgttttgggagtttgtagaacgtaggggcggatttcgcgtcgtattggtcgttaaggggcggtcgcggagggaaggggtgggtcggtgggtttgatagcgggtttgcgtaggcggtagcgtttgttttttttagtttttcgtttcgcgttatgggcgggtttcgggttttgttggtcgtattttgggcgttggaagtcgtcgggatcgtcgcgtttcgtatcggagtttttaatatttagagtttcggtgatagtaaagtgtcggatttcgtttgcggtagtattatcgcgaaggtggggttcgggtcggggcggggcggcgtttaggggtgttgatcgcgttgattttcgtattcgtcgtttttttttaga

SEQ ID NO: 16 - DNA, 5314 bp, Artificial Sequence
  chemically treated genomic DNA (Homo sapiens)
tttggggaggagcggcgggtgcgggggttagcgcggttagtatttttaaacgtcgtttcgtttcggttcgggttttattttcgcgatgatgttgtcgtaagcggggttcgatattttgttgttatcgaagttttgaatgttgaaggtttcgatgcgaagcgcggcggtttcggcggtttttagcgtttagagtgcggttagtagagttcggggttcgtttatggcgcggagcgagaggttgggagggatagacgttgtcgtttacgtagattcgttgttagatttatcgatttatttttttttttcgcggtcgttttttgacggttagtgcgacgcggaattcgtttttgcgttttgtaggtttttagggtattgttgggtttttagggatcgttgtttttttattgcgcgggaagttgtagtcggaatggagggttcggtttatttagttttagtttagggtagtcgagagatttattttggatgtgggtgtagaggttcgaggtttagagattttagggggatggggatttcgggtttaggttgcgggcgtgttcgatataggattgtattgattttttttggtagtagttttggtattaaggtaggggtcggtatttgaggttttgggttagggaggggtcgggttgtattgggtttcgttttttcgatttagttgggtgtttgatgaatttttggtttttatttttatggagatttttagggtaaggggtgggagatttgtttgagtcggttttggtgttttagatttgttttaaaatcgttttagaagtttttgttagttttttaggagggaggtagacggttagttatatttcggtgcggttgtgtttttgttttcgtttttagaaattaggtcgtttagattttgtttttttgagtagaatttttttagggaaagtaaggtagcgtaggtaggattagttatattttttatttagtattttttgttgttgttttatttgtttattttgcggtggaggtcgaggtttttagatttttttgttttcgtttttggtttttttatttatttataggttttaggtagcgtagttgggggtatagttttagttgggtagggtaggaggttgttggttaatatgttaatgatatttatatagtattaaggcgtcgttagggttggtagaagtttttgggtggggcggttaggtacgtgagtttaggagtggtttgggaggtaggtgttgttgcgggggtttgggtaaaggtggtggtattagtcgcggaggttgttattgttataatattataagttgtaggtttttatgttttattgtaaagtaataagaaatttttatgtatattgttcgttttggggcgtttttattttgtgttattttttttattaggttaggtaggtatgggtggggcgtttagagttttttgttttgtttttgttcggttaggatttcgtagattttatgttagacgatgatcgtttgtatttttagttggtttttcggcgaggcgatgattagttcgtttgtatgttttaggatttcgatgttttttgatgatattatggttatagtggtttgtttagtgttatttgtttttgttcgggcggtaagtatagtgttttcgttgatggtcgaggttagcgttatggttatttgttttgttaggttttcgggggtggcgatggtgatggtgtcggcggtagtcgtttttgggtttagcgtcgttttttcgtttatggtgacgttttgtacgatgatttggtggtcggcgttagtttggtgtacgatttgttgtattatttttatgatgtggttgtttatttgtagggttacggtttagtaagagcggttgtgttagggagttttttcgttttcgtttgttttattttttatttttgtttgggtgttttcgatgattttcgtggttttattggttttcgtatcgttcgtagtggtttgggtagatgggtagaaggatagaggttagttttggttgtttttgggttttagtacggttttagggttttatatttatttcgatgatatatttttgggtgttagttattacggacgagaattttattaatattgtgtgcgggtttttcgtgaggacggtggtggttgtcgcggggttgtttttagatattagtaatttttttatttttagtaggtagttttttgtgggtggggattcggttagggttaggtaagtttcggttttttttttttttttttttatttttatcggtttagatttttggtgcgtaggtgtcggtttagcgtgtcgtgttcggcgaagttacggtcgtatttgtagtatttgaacggtttttcgtttgtgtggtgtcgtacgtgtcgtattagtgagtttttttttcggaagttacggttgtagaattggtatacgtgcggttttttttttaggtgtgttttgaagtgtatttgttgtgcgttttgtggagatatttgttagtgttagtttggttttggttataatagattatagtttttttttttcgtttgtggtttaagggaggggttgggttaagattgagtatggtggaggtagggaagggggtgtatttgggttacggttagggagtaggatggggggattaggcgttagggttttgcggttagagatttattttagttttgtagcgtttgttatatttgggataagggtagggtcgttcgtttgagtggacgcgtcggtggttacgtatatgggtaatggttttgtagagtttttcgtagtcgttatagcggaagcggcgtttacgtacgtgtattttttggtgttttttgagtaggtaggttttggggaaggttttgttatattgcgcgtaggcgaacggtttcggttttgtagttatatatagtattaggttaagtttattattcgcgggttcgttaggtcgtttgttatttgtttatagattttttggttttttgttgtttatggatttattttggatatttagaagtatttcggttatttatagtttatttattgttatgggttatatatttatttattatttatcggtgtggttttttttgtgggtttttagggtggttgttgtcgggaaggttttattgtattgaggatatgggtgggttttgggtatcgttgaggtttcgttggttatttgttggggaattataggaaggtttttagtattcggggtaggttgtgttttggtagtattaagaatataattatgggttttattttggtaggtttttttgtggttttagggaaggtagtaaatagattaatggataaagttattgtagaaagttattttagggaggcgaaggttagcgtggggatagtttttgggatttagttttgggaggagttcgtaggtggtgttggtatttattgtttttagcggttgtatttttagtatcggtagttgcggggttgttattgttaggggttggggattggattcggtagtaggagttggttttagggtatttttttttttagtagcgcgtttaaggacgatgtcggagttttgtatggtttggtgtagtaggtttttacggttgttttcgttggagtaggggagtttttgggagacggggggttgtaggggaggtagagagaggaggttggttaggtagtttggtatttagtatttattttatggggtagacgtacgttaggagttttgtgtaaatttttagatttttatggcgtttttattggttttgttttttttgtgggaagtttagttttcgtttgtttggtttagatttttggagttagtgtttagaataaagattggtatcgagtaggtagaagatagagtagtttttcggggtttttcgtcgtttttatttttggggttagggtttttatgtttagggatagtttttgtatttggacgtggatttcgtggatgacggtgtttttggtatttgttattaggtgaattacgggtgaagtttttataggttcgtttgttatcgatgatgtggttgtttttaagtcggtagttttagttttagaatttttaaggtggagtgagggagtgaagattttttatatattttagtggcggttgcgtttatagttagtttttaggattaggtagttgttcgtattatgttgatttgtacgtgcgttttttttgttgataattacgtttttgtttatattgaagcggattttttttgtgtagggggtgagagatttgaggtgtcgggttagtgtattcgattttcggaagttttttttatatttggagtatttgtaggggcgtttatttgtagagagaatttagttagtttcgggtagttttagtaggttggcgataaggtgataaggcgaaggtaggtaggggttttcgttttattttttaaagttggggaatgcgaggttggggtattttagggttaattatcggggtgttatcgggttttagttcgaggtgcggttagtttattcgtgtgtcgtcggtggtgtcggatgagtgagtttttggtgcggaaggaggttttatagagtttgtattcgtggtttttgcggttgttgtgagtgattatgtgggttttgaggatgttgttttgtgggggagggcgtggtagtttagggtttttttgggggaataggagggggtttgttatttatatattggtttttcgtacgtcggtttatcgttttgaaggttttgtggtatagcgtatatatatagcggttatttttgtttattagtagttttatttgggtttgtttatttttttttgcgagttttagtttttgttggcgggggttgttcggggtttcggttattttatcgttttttagtttcgttttagtagttacgatgatttttttgatgtgtttattatttaggagaagtatttgggtttaagttttaggatttgtttttgtttagagattttagagattgttggttttaggggaggggatttgttgttttgagttatattttggatttaatttgtattgagtttttaatatataggttcgagtaatagttaaggttttatttatttttttaggttagagtgagaggtggagagatatttttcgattttgttaggttgtttagagatgttttagggtttttaaatgtgtttatagggagatttattatggagtatagatgttttatttttaaagttaggaggacgtgcgaattttggtgataaggtttttgggtgaagagatagtcgtttgttttgttcgttgttattgtttttgttattgtttttattaatatagggaggatgtgcgttcggggttatttttttatcggaggagatgggttggg

SEQ ID NO: 17 - DNA, 5535 bp, Artificial Sequence
  chemically treated genomic DNA (Homo sapiens)
gttatttcgggtttcgggcgttataaatagagttcgtcgagtcgagtcgtttttttttattcgggtttttttgcgttttcggtttcgtcgcgatcgtcgggtcgcgcgttatcgcggttaagtttagaggcgggcggggacgttagtttggttattgcgtttttcggcggtgttcgtttttagagttttcggtcgggttgtttttcgtttttcgtttaggttttttttggcggaattgtcggtgagggtttcgtttttatagttttcgtttttattttattcgtttcggggcgaataaagggttcgaagttgagaggaggggaaggtttgggatgggagtaggggtcgtagttggggagtggtttaaattggagttgcggttgaattttggaatttggggcgtttggaagaaagaggcggaatcggagtttggatacggttgggggattcgaacgcgtaattttgggagtcggggagattcgaattcgggattttaaagtttagttttgaaatagtttaggttgggagtagtggtttattatagtaatttcgatattttgggagggcgagaagggaggatcgtttgagtttaggagttcgagattagtttgggttatagtgagattttatttttttatttttacgtttttataaaaaaaatataaaagttggttaggcgtggtggcgcgcgtttgtggtttagttattcggtaagttgatgtgggaggattatttgagttcgggaggttgaggttgtagtgaggtgtgatcgtattatcgtattttagtttgggtgatagagagagatttcgttttaaaaaaaaaaaaaaaaaagaaagaaagaaagaaaaagaaaaaaagaaaagaaattgagggtagaaatttaatatttaatttgttaatttggaaataacgtagaatttagggtaatttttttttttcgtttttaattaacgttaatcgatttagaattttattgatcgtaggcggcgggttttttatcgtatttttgttttaaggaaatgaatcgggagcggggaatgggtcgttttttagggggttttgttttcgttgggttttggcggagtagagaggtttcggttttttaatatttttaatttttttgtggtgtattatcgtttttttgtagaaaacgtaggagttgtagggttaagtttggtaattttattttttaaggggataattgagttataagtttttttatttgggatgatttatttttagaatcgttgtatggttttggatatagaggtatattttattttttttttttttcgttttttgagacggagtttcgttttgtcgtttaggttagagtgtagtggtgtaatttcggtttattgtaattttcgttttttgggtttaagtaatttttcgttttagtttttcgagtagttgggattataggcgttcgttattacgttcggttaattttttttttgtattttttagtagagataaggttttattattttggttaggttggttttgaatttttgatttcgtgatttattttttatcggttttttaaagtgtcgagattataggcgtgagtattgtgttcggttttttgggggaaaattatatttagtgatgagattattagattgatttttttttttttttattaggcgtgagtattttttttggtttttatattttttaatattgtaagaaataatattaagaatttaggattttggattttttttttttttttttttttttttttcgtttttttgtttgtttgtttgttttgttttgtttgtttttggttttattttgttatttaggttggagtgtagtggtataatcgtagtttattgtagtttttgttttttgggtttaagtaattttttttttttagttttttgagtatttgggattataggtgtatattaatatatatagttttttttttttttttttttttttagatggagtttcgtttttgtcgtttaggttggagtataattgcgtgattttggtttattataatttttatttttcgggtttaagtgatttttttgttttagttttttaaagtgttgggattataggtatgagttattttgtttagttaatttttgtgtttttttgtagagatggggttttgttatgttgttttggttggttttgaattttggagtttaagtaatttgtttattttggttttttaaattgttgggattataggtatgagttatcgtatttagtttagaattttggattttaattgttagggtgaaaagaaaaaggtatttgaggtaagtaaggtttaggataataaatttgggtaatagattaagattttgttttaaaaaaaattttttttttttttttgagatggagttttatttttgttgtttaggttggagtgtaatggtgcgattttagtttatcgtaatttttgtttttagggtttaagtaatttttttgttttagttttttgagtagttgggattataggtatgtgttattatgttcggttaatttttttttttttttttttttttgagatagagtttggttttgttatttaggttggagtttagtggtataatttcggtttattgtagttttcgttttttaggtttaagcgatttttttgttttagttttttgagtagttgggattataggtgtgcgttattacgtttaattaattttagtatttttagtaaagacggggttttattatattggttaggttggttttgaatttttgatttcgtgattcgtttgtttcggttttttaaagtgttgggattataggtgtgagttattgtatcgggattttaattttgtatttttaatagagataggatttttttatgttggttaggttggtttcgaatttttgattttaggtgatttattcgtttaggttttttaaagtgttaggattatagatattagttattatgtttagaaaaaaaaaattaagtaaaatgggaaaatgtagatatagatagatatttatagatgaaagattgatgtgaataaagaaatagagggatgttatgtatatgtaggtaagaataaataaaaagattaatgaatataatagaaatgttagaaatagacgtgtgtgtatgggaatttggtatgtgataaaggtagaattttagaatagtggagaaaagatttatttttggttaatttgagataattggttatattatttataaataacgatttcggtgtatttttaaaaataaattttggttaggtatcgtggtttatgtttgtaattttagtattttgggaggttgaggtgggtagattatttgaggttaagagttcgagattagtagggttaatatggtgaaatttcgtttttattaaaaatataaaagttagtttgtaattttagttatttgggaggttgaggtaggagaattgtttgaatgtgggtggcggaggttgtagtgagtttagattgttttattgtattttagtttaggtaataagagtaaaattttattttaaaaaataataaataaataaataaattttatatagattaaagttagatgatttgtttattttaggttattattgtttgggatcgtgtttgtgttttttattgaattgtaagttttgggaggataatacggggtttttattttttacgtagataaaagaaatgatagaatatattattatagtcgtgtattgtaattttagtattttgggaggttataaagtgattttaggattagttgaggttaggagtttgagattagtttggttaatatggtgaaatttcgtttttattaaaaatataaaaaaaaaaaaaaaaaaaaaaaattagtcgggtatggtggtatatgtttgtaattttagttattaaggaggtaggagaatcgtttgaattcgggagggggaggtgtagtgaattgagatcgcgttattgtattttagtttgggtaataagagcgaaatttcgtttcgaaaaaaaaaaaaaaaagaaaaaaaagaatttattattatgattttgggttatggtagggtttttaatatattaaaagtaaaagttagaacggaatagattgataaatagttgcgtataaatataaataatttttgtgttaaaaataattaaagttaaagtttaaagtagaaattaggaggaaatgtttgtaatatgggtaattaaggattagaattagaatttataaagtatttttagaaattaatagtaataaaaaagttatataatttattttaaaaatggataaggaatatgagtaagtaatttatagaagataaaatttataagattaatatttttataaaaaatattttatttttttagtaattagagagttgtaagttagaatagtgtgatattatttttttaggaagtgattaatattaatttattagttaggtttttgtttagatgtttttttttttaggaagttttttcggatttcggggttgagttaggcgttttttttgatttttattttacggttttttcgggattttttattttagatttgtttattttgggttagtattgggaacgtgtttgtgttttttattgaatcgtaagtttcgggaggataatacggggttgtcgttggttattgttgtgttattagtacggattcgtataggatcgggaagagaggaagcgcgtggggggaataggtgtggaataaatgaatgaatgaggaaattgaagttaagttaatgtttgagttggatttaaatttaagtttttttttattgagaggagggattaagttggattttttgcgatttgttttttattgagttttgttaggattttgggtatatagaagcgtttagtaagggttttgaaatttaatagtttgggagttagatttttaggttatatttttttttttttacgattttcgcggttttttagaattatagagagttgtatagagatcgttttgttttatgttttatttttttggggagcggggttagagaggtcggaagtgttgcgagttttgggttacgttggtcgtgttggtagtgggtcgtttcgatttttttgtagttttttttttgaggttttaagattagtaggtgaggtttcgcggcgttgaaatcgtgaggttcggattataggtgcgggaggcggagattgcgggtggagattggcgtcgcggaagttaattattgtcgagtttgagagatggataaggttaggcgtggggagggcgtttagatgttagtttcgggggtcggacgaacggaaggcgggggatggtggggacggagttaatagaattcggtgggggcgaggggcggagcgatgggatttgtggatttgtaaggggcggggcgagtcgaaggtggaggttaaaggggcgtggcgttatagagtttttagcgttgggtgttggggatttgacgttatggagttttcggagttttgtgggggacggttgtgagtggggggtttttgttgcgggatgagaacgtagacgttagtggtttattcgtttttggtatttttttttttagg

SEQ ID NO: 18 - DNA, 5535 bp, Artificial Sequence
  chemically treated genomic DNA (Homo sapiens)
tttgaaagggaaggtgttaggagcgagtgagttattggcgtttacgtttttatttcgtagtaggaattttttatttatagtcgttttttataaaatttcgagagttttatagcgttaggtttttaatatttagcgttagaggttttgtaacgttacgtttttttgatttttattttcggttcgtttcgttttttataggtttataagttttatcgtttcgtttttcgtttttatcggattttattggtttcgtttttattatttttcgtttttcgttcgttcggttttcgaggttagtatttggacgttttttttacgtttggttttgtttattttttagattcggtaatgattggttttcgcggcgttaatttttattcgtagttttcgtttttcgtatttgtggttcgggttttacggttttagcgtcgcgaggttttatttgttggttttggagttttaagggaaagattgtagagggatcgaggcggtttattgttagtacggttagcgtggtttagggttcgtagtattttcggtttttttggtttcgttttttaggagagtagagtatagagtagggcgatttttgtataattttttatggttttggaggatcgcggaggtcgtgggaggagagagatgtggtttgaggatttggtttttaaattgttaagttttaaagtttttattgagcgtttttgtgtgtttagaattttggtagggtttagtggagaatagatcgtaggagatttaatttggtttttttttttagtaaggagagatttaagtttgaatttaatttagatattgatttggttttagtttttttatttatttatttattttatatttattttttttacgcgtttttttttttttcggttttgtgcgagttcgtgttggtgatatagtagtgattaacgatagtttcgtgttgttttttcggagtttacggtttagtaagggatatagatacgtttttagtgttgatttagaatgggtaggtttgggatgggagatttcgggagagtcgtgggatgggggttagggggagcgtttgatttagtttcggagttcggaagggttttttggaggaagggatatttgagtaggggtttggttgatgagttagtattagttattttttgaaaggatagtattatattgttttaatttgtagttttttgattattaaggaaatggaatgttttttgtgaaagtattggttttgtaaattttgttttttgtgaattgtttgtttatattttttgtttatttttaaaatgggttgtatggtttttttattattattaatttttaggggtattttatggattttgattttaatttttagttatttatattgtaaatatttttttttagtttttattttgggttttaattttagttatttttggtatagaagttatttgtgtttatgcgtaattatttattaatttgtttcgttttgatttttgtttttggtgtgttaagagttttgttataatttagggttataatgataaattttttttttttttttttttttttttttcgagacggagtttcgtttttattatttaggttggagtgtaatggcgcgattttagtttattgtatttttttttttcgggtttaagcgatttttttgtttttttagtagttgggattataggtatgtgttattatgttcggttaattttttttttttttttttttttttgtatttttagtagagacggggttttattatgttggttaggttggttttaaatttttgattttagttgattttgaggttattttgtgattttttaaagtgttgggattatagtgtacggttataatgatatattttattattttttttatttacgtaaaagataaaagtttcgtgttgtttttttagagtttatagtttagtgagggatatagatacggttttaaatagtaatgatttagaatgagtaggttatttggttttaatttatgtaagatttatttatttatttattattttttgagatggagttttgtttttgttgtttaggttggagtgtaatggagtaatttaggtttattgtaattttcgttatttatatttaagtagtttttttgttttagttttttaagtagttgggattataggttaatttttgtatttttagtagagacggagttttattatgttggttttgttggtttcgaatttttgattttaagtgatttgtttattttagttttttaaagtgttgggattataagtatgagttacggtgtttggttaagatttatttttgaaagtgtatcgaggtcgttgtttatgagtgatgtaattaattgttttaagttgattaaaggtagattttttttttattgttttgaaattttatttttattatatattaaatttttatatatatacgtttatttttgatatttttgttatgtttattgatttttttatttatttttgtttgtatgtatatgatatttttttgtttttttgtttatattagttttttatttatgggtgtttatttgtgtttatatttttttattttatttaattttttttttttgggtatggtggttaatgtttgtaattttagtattttgggaggtttaggcgggtggattatttgaggttaggagttcgagattagtttgattaatatggagaaattttatttttattaaaaatataaaattagagtttcggtgtagtggtttatatttgtaattttagtattttgggaggtcgagataggcggattacgaggttaggagtttaagattagtttggttaatatggtgaaatttcgtttttattaaaaatattaaaattagttgggcgtggtagcgtatatttgtagttttagttatttaggaggttgaggtagaagaatcgtttgaatttgggaggcggaggttgtagtgagtcgagattgtgttattggattttagtttgggtgatagagttagattttgttttaaaaaaaaaaaaaaaaaaaaaaattagtcgggtatggtggtatatgtttgtaattttagttatttaggaggttgaggtaggagaattgtttgaattttggaggtaaaggttgcggtgagttgagatcgtattattgtattttagtttgggtaataagagtgaaattttattttaaaaaaaaaaaaaaaattttttttgagataaggttttgatttattgtttagatttattgttttgaattttgtttattttaaatgtttttttttttttattttaataattgaaatttagaattttaggttgggtgcggtggtttatgtttataattttaataatttaggaggttaaggtgggtagattgtttgggttttagagtttaagattagttagggtaatatgataaaattttatttttataaaaaaatataaaaattggttgggtaaggtagtttatgtttgtaattttagtattttggaaagttgaggtaggagaattatttgaattcgggaggtggaagttgtagtgagttaagattacgtaattgtattttagtttgggcgataaaagcgaaattttatttaaaaaaaaaaaaaaaaaaaaaaagttatgtgtgttggtgtgtatttgtagttttagatatttaggaggttgaggagggagaattgtttgagtttaggaggtagaggttgtagtgagttgcgattgtgttattgtattttagtttgggtgatagagtgagattaaaaataaataaaataaaataaataaataaataaaaaaacgaaagaaaagaaaggaaagaaaaaggaaatttagaattttaggtttttagtattgttttttgtaatgttagaagatataggggttaggagaggtgtttacgtttagtaggaaggaaggagaattagtttaatagttttattattaggtataatttttttttaggaggtcgggtatagtgtttacgtttgtaatttcggtattttgggaggtcgatggaaggtggattacgaggttaggagtttaaaattagtttggttaagatgatgaaattttgtttttattaaaaaatataaaaaaaaaattagtcgggcgtggtggcggacgtttgtaattttagttattcgggaggttgagacggagaattgtttgaatttaggaggcggaggttgtagtgagtcgagattatattattgtattttagtttgggcgatagagcgagatttcgttttaaaaaacgaaaaaaagaaaaaatgaaatatgtttttgtatttaagattatatagcgattttagaagtaggttattttaagtagaagggtttgtgatttagttatttttttggggaatggaattgttagatttaattttgtaatttttgcgttttttgtaagggggcgatggtgtattataagaggattggaagtgttggggagtcggggtttttttgtttcgttagaatttagcgggggtaggattttttagaaggcggtttatttttcgttttcgatttatttttttgaagtagaagtgcggtaaagggttcgtcgtttgcgattagtggaattttgaatcggttaacgttagttaagagcgaggggaaaaaattgttttgggttttacgttatttttaagttggtaagttggatgttggatttttatttttagtttttttttttttttttttttttttttttttttttttttttttttttttttttgagacggagtttttttttgttatttagattagagtgcggtggtgcgattatattttattgtagttttaatttttcgggtttagatgatttttttatattagtttatcgagtagttggattataggcgcgcgttattacgtttggttaatttttgtattttttttgtagaggcgtgggggtgggggggtggggttttattatagtttaggttggtttcgaatttttgggtttaagcgatttttttttttcgtttttttaaagtgtcgggattattgtagtgagttattgtttttagtttaagttgttttaaaattaaattttggaatttcggattcgaattttttcggtttttagagttgcgcgttcgaattttttagtcgtatttaagtttcgatttcgttttttttttttaaacgttttaagttttagaatttagtcgtaattttagtttgggttattttttagttacggtttttgtttttattttaaatttttttttttttttaatttcgagttttttgttcgtttcggaacgggtggggtggggacggagattgtaaggacgggatttttatcgataatttcgttaaaggggatttgaacggggggcggagagtagttcggtcgaaggttttggaagcgggtatcgtcggggggcgtagtgattaggttggcgttttcgttcgtttttaaatttagtcgcggtgacgcgcggttcggcgatcgcggcggggtcggggacgtaggggggttcgagtggaggggggcggttcggttcggcgagttttatttatagcgttcggagttcgaaatagt

SEQ ID NO: 19 - DNA, 6866 bp, Artificial Sequence
  chemically treated genomic DNA (Homo sapiens)
gttggttaggttggttttgaatttttgattttaagtgatttatttgttttggttttttaaagtgttgggattataggtatgagtattcgttatttaagatatattgtttaataaatgatgggttttgtgatttattaaggttaagtgattattcgggtaatgttggattttagtttaggtttacgtgattaaaggttatgttttgttttttagagtacgtagttattgtagatattgagttatgttaaagtagtggatttagagggatttttggtttatagttatttagtgtatattggtagaatttttttagatgtgtaaatattatatttagtatttaaattttttaaatttagtatgtttagtcggtaatgttagtaattagagggagttacgattgttgagaattatgtagtagggagtttgagggtagaaatttattaatttttagtataggcgtttttgtggaatattgatagttggtttaatatttaaatagagtatttttggttttttttatattagtaggtgttttttatttttggcgtttgaaatgtgtgtgttttttaagattgtaaaaataggtattttttatatttttatataggaatatttagaaataaatagtatttggaaagttgtatatattttatatgaagttattttatttttataagagttttgttataagtttgatgtatgagtatagatatttgtatgtttataaagttttggtgatgatgtttttaaaattttttgttttagagaaaagtagggagaggtaggataattgcgatgaagtattgttttgtttgagagttttttattaaataaatgtgtaaatatttaaatttatgttttatgtttttaaatttttatatgttatggattaggataaaagtattaaattttaagtagaatattgggaaaattttaaataaaatttaatttttttaattttataaattattttgttgttgtattgttattttttaattggttttttttttcgatatttttaaattatagttggttggatttatagatgtagaatttatagagggttaattgtaagtttttatttatttatatttatagtttaggtaaagataatgtgtatttatatttaaatatatttaggtagatatatagaaaatttgtatatatttaaatttatgtagagatagatagagaaataaatataaaattaagaagtttttatgaaataaaagtagggagttataaaggtaaagatagaaatgtagaataaaaagttaaattaagaaaagaataatgaggaaatttaaattttaatagaataattaaaatttttattggagataatttaaagtagaaaggatattaaaaattataagagatataaagaataaattttaggttggaagtggtggtttatgtttgtaattttagtattttgggaggttgaggtaggtagattatttgaagttaggagtttaagattagtttggttaatatggcgaagttttaattttattaataatataaaattagttggatatagtggtgtgtgtttgtaattttagttatttaggaggttgaggtacgagaattgtttgaatttaggaggtcgaggttgtagtgagttaagtttatgttattgtattttagtttgggcgatagggtgagattttgttttaaaaaaaaaaaaaaaaaaaaaaaaaaaatttttattttagattgaaagtttttatttagggataaaaataaaatgtgtagttataatttgttataatttataaaagtttatttttttagatattaatatttgatattaaatgttgtttattatatatatttaaatttagaatttataaggtgatattttttagtgttgatgaagtatttatatagtagttgggaagttttttttttttatttttattataaaagtaatataagtttatgataagaaagttaaatagagtagaagggtatatattgaaatataaaggtttaattttgaaatttattatttatgttagttttttagaagtaattgttgtggttaagatttgtttattttaggatttttttatgtatatattatttatcgttttgtttttatataaatgggattatattatatattattgttttgtaattgttttttttagtatataataatatatattgagtatttttttatatataggtttttatggttaatattttatttattagagatgtataaagaaattttaattatttttttatttttggatatttaggagaaatatttaagaaataataatagtttatataatgatataatgaatatatatttttatatataagttttttattagaatataagttttatgttcgttttgtttattagtaagtttttagagtttagagtagtgtttgatatattgggtgttttataaatatttattagatgattgtatgtgtatatgtatttatatatgtatttaaaatttttgtgtagattgattaatcgttttttaaaaagattgttttattgtatatttttatgtatagtttttgtttgtttggttggttggttggtttttttgagacggaatttcgtttttgttgtttaggttggagtgtaatggcgttatttcggtttatcgtaatttttgttttttgggtttaagcgatttttttgttttagttttagttgagattataggtatgcgttattacgtttggttaatttttgtatttttagtagagacggggttttattatgttggttaggttggtttcgaattttcgattttaggtgattcgtttgtttcggttttataaagtgttgggattataggcgtgagttatcgcgttcggttttatgtatagtttttaaattttattttgttttgattagtttgggacgttatttgattaaacggatttaatataaatttattattttttagttttgggggtcggaagtttaaaatgggtggatagagttgtagttttttcgggagttttaggggagaatttatttttttgttttttttagtttgtaagggttgtattttttggtttagtgttcgttttatattattttgaattcggttttttgttatatttttgaatttgatttttttattttttttttttttttataagtatatttgtgatatattgagtttatttggataatttatataatttttttattttaagaattttaatatatttatatttgtaaatttttttttgttatataaaataatttataggttttagggattaggatatgaatatttttgggaagtcgatattttgtttattatcgtttgggagttaggtttgaattttagttttgttattttaatttttattttttaaatatgtgttgagtatttttatattacgttttgaaatagatttaagaaatatattaattagttttcgtggttttgtttaagttatataatttttttgtatttttattttttttattggtagaattgacgagattaatatttgttttagaggaaacgttgtatgtaaagtgtttgtcggtaattttttttatttaaatagtatttaggaattatatgttatttttattttgataaaatgtaagtaaaatattagattaagtagtaaagaggtagaggaatagatttttttggaaacggttagtgtgaatgtgaattggtataggttttttagagggtaatgtggtaatgtgaatggaatgaaaagttttataaatttttttttttttattttagtgattatttatttttagacgtgtatttgaaggttacggttgaatttatatataaagatgtttagtgaaatattatttatattattggaagggaaaaagtagaaatagattaaatgttttttaataagtaattaggtaagtatatttatataatggaaattttattagttatataaaaggattttgtaaaagaatatgaaatattatgtttagaggtttgttaaatgttaatgataaagttggggatttaaattagggatattaattatttcgtgtcggtaaaagaatttcgtgtgatgagagaatgtgtatatagatagaaaaaaaaggattaaataaaatagatttcgtgatgttaatagtggttatttttaagtaatggaaataagtgatttttatttttgtttatttgtattttttattttttaataataaaggtggggggtttttatataaaataatttttttattagtttaattattaggtatttttaggtatagaataaatattgcgggaggtgtttttttagtggaaggagggatttttaaaaatagtttattgtattgaagtttttgggaggtaaatagaggtttgaagttagtaaatgattttgtttattttatagttattgtattttagtttgggtaatatattaatattttgtttcgggaaagaaaaaaaaaattaaaagaaggatggggagtaatcgtaaaaggaagggttaaaaattattttaggaaataggtgttattaatttttggcgtatttggaatattgattagtaatttttttaattgtcgatgtcgggggattaagttttttaggtttattttttttttttttgttttttggtagtttgaggttagggtgttaggggatgtggaaatttaaaagagacgtgaatggagtttgatatttgtaagttatatcgatagggggcgttagtttttataggtgattttatgaattttcggttttattcggttttttttcggttgagttcggttaacgtttgtttttttaggttcggtttttttcggttttttgagagcgcgtttgtcgtggtttcggttttttttcggttgcgttcggtttacgattattttagttttagtttttttcggttacgttcggttggttgtcgttttttcggattcggtttttttcggttgagttcggtttattttttattaggagtcggtttttttcggttgcgttcggttgcgattcggaagagtttttatggagttagggtagtcggttcgacggattgttatggcgtcgttgttggagtacgagcgatagttggtgttggaattgttcgatattgacgggttagtagtgtgcgttcgcgggttcggcgcggatcggtttttttattattttttttagttgtattgttatttagtttgtttggtgttggtgtttaatacgtagtcggtcgaggaggtgcggtcgcgttggcgcgggagtgaggggatttcgagagtgttgagggttttttgagcggatgcgaggtttttgatagggatggaggggttttgagggggatttaggtttttgatattacgcgatgatatagagaaggatggtaggggtttttagggggatgtaggttttttatattgcgggaatatagacgtatgtaaggggtcgttaggaggatatcggtcgtttatatcgtgcggggatattgataagaattggaggggtttcgagaaggttgtaggtttttggtaggagttgaagaatattaagaggaatgttagtttttgatattgtgcggggattttgagagggaagggaggggttttaagaaggatgtaagtttttgattagagtttaagaatattaagagaaatgggaggggtttttaggggatgcgggtttttgatattgtgtaggtatagtgagaatgatggaaggggtttcgagaaggatgtaattttttgataatattaagagggatgggaggggtttttagaaggatgtaggtttttgatatgggtgtaagggtattgaaaggtgaaggggttttgagtggtaggagaggatcggaggtcgttgtaggggagggggagatgtcggaaggaggatttggataggaataacgggagagttttgaagttggttattaagggagtttttgggggtagaaggaaggtttttgaaagggaatagtgatgaggatggaagatttttgagggtgatggggagatatgaaaggagatgttgaggcgttggaaaaattttaatagggaaaaggagggattaggaaataggatatttattaaggttgtgttaagagggttatagggttagaaagggattggagtttgacgttgaggatgttggtaaaggttaattatagttaaggataatggagaatattgagaaagatggaatggggttatatatgggtttgaggggtgttgagaggggatatagtttggtcggataagtttgatgattttttagatatattaggtggtcgggagaaaaatgttagttgagaagagtgattatagtttttttgagggtagggattttgtttgatttatttaggtatttttagtgtttggtatagggtttaaggtaatatatagggtttagtaaagatggttttaaattggggatataaataaattaagttaagggatttagtgatatgaagtttttttaggatagattagtatagaattgatagtttaaaatattgtttggggaaaggatttttttgttattattttatagaatgtgtttggttataaatttggttttggtgggaagtattttttaggtagtagaaattttttaatttaggtttttaaaagtttgaggttttgtatgtgtgtgtatatgttattgtagttgagtgttgataatgattgaagtgtaattattttttagtgtaaattttaaaataagaaaattttattaaatgtagattggttggttgaagttattataaagaagtaatttagtgtgtatatttattattaagtttattattttagagaaagatagtatattattttaaatatttgtgatttattaaaaattgttttgtattaaatagtttattaattaagtttgatttgatttagg

SEQ ID NO: 20 - DNA, 6866 bp, Artificial Sequence
  chemically treated genomic DNA (Homo sapiens)
tttaaattaaattaaatttgattagtaggttatttaatatagggtagtttttaataggttatagatatttaaaataatgtgttgtttttttttgagataatgaatttaataatgaatatatatattaagttatttttttatagtaattttagttaattagtttatatttaatgaggtttttttgttttggggtttatattaaggaataattgtattttagttattattagtatttaattataataatatatgtatatatatataaaattttaaatttttaaaagtttggattaaaagatttttgttatttagaaaatattttttattaaagttaggtttgtagttaagtatattttatgagatgataataagggaattttttttttagataatgttttagattattagttttgtgttaatttattttagagggattttatgttattgggttttttggtttggtttatttatatttttagtttaaaattatttttattaggttttgtgtgttgttttaggttttatgttaagtattggggatatttagatgaattaaataggatttttgtttttaaagagattgtggttattttttttagttgatatttttttttcggttatttgatatatttaggggattattagatttgttcgattaagttgtgtttttttttaatattttttagatttatgtgtagttttattttattttttttagtgttttttattgtttttaattgtagttaatttttgttaatatttttagcgttaagttttaatttttttttgattttatggtttttttaatatagttttggtgaatgttttattttttggtttttttttttttttattggggtttttttagcgttttagtatttttttttatgtttttttattatttttagagattttttatttttattattgtttttttttagggattttttttttgtttttagaaatttttttaatggttaattttaggattttttcgttatttttatttagatttttttttcgatattttttttttttttgtagcgattttcgatttttttttattatttagagtttttttattttttagtgtttttgtatttatgttagggatttgtatttttttggggattttttttattttttttagtgttgttagggaattgtatttttttcgggattttttttattatttttattgtgtttgtatagtgttagggattcgtattttttggggattttttttattttttttagtgtttttgaattttggttaaagatttgtattttttttgggatttttttttttttttttagagttttcgtatagtgttagggattggtattttttttagtgttttttaatttttgttagggatttgtagttttttcggggtttttttaatttttattagtgttttcgtacggtgtgagcgatcggtatttttttagcgattttttatatacgtttgtgttttcgtagtgtgagggatttgtatttttttggggatttttgttatttttttttgtgttatcgcgtagtgttaggggtttgaattttttttagagtttttttatttttgttagaggtttcgtattcgtttaggaggtttttaatattttcggagtttttttattttcgcgttagcgcggtcgtattttttcggtcggttgcgtgttgagtattagtattaggtaggttgggtggtagtgtagttggagaaagtggtagaggagtcggttcgcgtcgagttcgcgggcgtatattattagttcgttagtgtcgagtagttttagtattagttgtcgttcgtattttagtagcggcgttatggtaattcgtcgagtcggttgttttgattttatggaagttttttcgggtcgtagtcgaacgtagtcgaaggaagtcgatttttagtggagagtaggtcgaatttaatcgaagagagtcgagttcgagaggacggtagttagtcgaacgtagtcgaggagagttgagattgagatgatcgtgggtcgaacgtagtcgaagaggagtcgaggttacgataggcgcgtttttagaaagtcgaagagagtcgagtttgagaaggtaagcgttggtcgaatttagtcgaagaagagtcgagtggagtcgaagatttatggagttatttgtaggggttggcgttttttgtcggtgtagtttgtagatattaggttttatttacgttttttttgagtttttatattttttggtattttagttttaagttgttaaaaagtaagggaaggggaagtaagtttaaggagtttaatttttcgatatcgatagttgaaaaagttattggttaatattttaaatgcgttaagagttagtagtatttgttttttagggtggtttttggtttttttttttgcgattattttttattttttttttaattttttttttttttttcgagataggatgttgatatgttgtttaggttggagtgtagtggttgtggaataagtagaattatttattgattttagatttttgtttgttttttaaagattttaatataataaattatttttaaaaatttttttttttattagagggatatttttcgtagtgtttgttttatatttagaaatgtttgatagttgaattagtagaggaattgttttgtatagaaattttttatttttgttattagaaaatagaaaatataagtaaataaaaatgaaaattatttgtttttattatttggaaataattattgttaatattacgaaatttattttatttagtttttttttttttatttatatatatatttttttattatacggagtttttttatcgatacgagataattaatatttttgatttaaatttttagttttgttattaatatttggtaaatttttgaatatgatgttttatatttttttataaagtttttttatatggttgatgagatttttattatgtgggtgtatttatttaattgtttattagaggatatttagtttgtttttgtttttttttttttagtaatataaataatattttattaaatatttttgtatgtaaatttagtcgtggtttttagatatacgtttagaaatgaataattattgggataaagagaaaaaaatttgtaaggttttttattttatttatattgttatattgttttttagaaagtttatattaatttatatttatattagtcgtttttaagaggatttgtttttttatttttttattgtttaatttggtattttgtttatattttgttaagatgaaaatagtatataatttttgaatgttgtttaagtggaaagggttgtcggtagatattttatatatagcgttttttttgaggtagatattaatttcgttagttttgttagtgagaaaaatggaggtgtagggaggttatataatttgggtaaggttacgggagttagttagtgtattttttagatttattttaggacgtgatatgggggtatttaatatatatttaggaaatgaagattgaaatgataaagttgaaatttaaatttgatttttaagcggtggtaggtagaatatcggttttttaaagatgtttatattttaatttttggagtttgtaggttgttttatgtggtaaaggggggtttgtagatgtgagtatgttaaggtttttgagatggggggattatatggattatttaggtgggtttaatgtattataaatgtgtttataagagaaagagagaggtaggagggttagatttagagatgtgataggaggtcgagtttagagtgatgtggaacgggtattgaattaaggaatgtagtttttataagttgaaaaaggtaaggaaatggatttttttttagggttttcgggaggattgtagttttatttatttattttggattttcgatttttagaattggaagataatgaatttgtgttaagttcgtttgattagatgacgttttaagttgattaaaataaaataaaatttaaaaattatatatagggtcggacgcggtggtttacgtttgtaattttagtattttgtgaagtcgaggtaggcggattatttgaggtcgggagttcgagattagtttgattaatatggtggaatttcgtttttattaaaaatataaaaattagttaggcgtggtggcgtatgtttgtaattttagttaaggttgaggtaggagaatcgtttgaatttaggaggtagaggttgcggtgagtcgagatggcgttattgtattttagtttgggtaataaaagcgaaatttcgttttaaaaaaattaattaattaattaaataaataaaaattatatataggagtatatagtgaaataatttttttggaaggcgattggttaatttatatagaaattttaaatatatgtatagatatatatatatatatagttatttggtgaatgtttatggggtatttaatgtgttaggtattgttttaagttttgggagtttattagtgggtaaagcgggtatagaatttatattttagtggggagtttgtatatgaagatgtgtatttattatattattgtgtggattattgttattttttggatattttttttaaatgtttaagaataggagagtagttaaaatttttttgtgtatttttgataggtagaatattagttatgaaaatttgtatgtggaaagatatttaatatgtattattgtatattgaaaaaagtagttgtaaaatagtaatgtatagtatggttttatttgtataaaaataaaacggtaaatggtatgtgtatagaagagttttagaataaatagattttaattatagtaattatttttggggagttgatataagtagtgggttttaggattagatttttgtattttagtatatgtttttttgttttgtttgatttttttattatgaatttatattgtttttataataaaaatgaaagaaaaaaattttttagttattgtataaatattttattagtattaaaaaatattattttgtgaattttagatttaaatgtgtgtggtgggtaatatttaatgttaaatgttggtatttggggaagtagatttttataaattgtgataggttgtggttatatattttatttttgtttttgggtaaaagtttttaatttgaggtgaagattttttttttttttttttttttttttttgagatagggttttattttgtcgtttaggttggagtgtagtggtatgaatttggtttattgtaatttcggttttttgggtttaaataattttcgtgttttagttttttgagtagttgggattataggtatatattattatgtttagttaattttgtattattagtagagttggggtttcgttatgttggttaggttggttttgaatttttgattttaagtaatttgtttgttttagttttttaaagtgttgagattataggtatgagttattatttttagtttaaagtttgttttttatattttttatggtttttgatgttttttttgttttaaattatttttaatgaggattttaattattttattagaatttaaatttttttattattttttttttaatttggttttttgttttgtatttttgtttttatttttatagttttttatttttgttttatagaagttttttgattttatgtttatttttttatttatttttatatagatttagatatatgtagattttttatatatttatttagatatatttagatataaatatatattatttttatttaaattatagatatagatagatagaaatttatagttggttttttgtgggttttgtatttgtggatttaattaattgtggtttgaaaatatcgaaaagaaaaattaattaaaaaataataatatagtaataaaataatttataaaattagaaaagttaaattttatttgaggtttttttaatattttatttaaaatttgatatttttgttttaatttataatatatagggatttaagaatataaagtataaatttggatatttatatatttgtttagtgaagagtttttaagtaaagtaatgttttatcgtagttgttttgtttttttttatttttttttggaatagagaattttaagggtattattattagaattttatagatatataaatatttatgtttatatattagatttatagtaagatttttgtaaaagtggaatgattttatataagatgtatgtagttttttaaatgttgtttgtttttaagtgtttttatatagaaatatgagaggtgtttatttttatagttttagaaggtatatatattttaggcgttaggagtgagaaatatttgttggtgtaggaagagttagagatattttatttagatattagattagttattaatattttataagagcgtttgtgttgagaattggtgagtttttgtttttagattttttgttgtatgatttttagtagtcgtaattttttttggttgttggtattgtcggttgagtatgttgaatttaaagaatttaagtattaaatataatatttatatatttggaggaattttgttaatatgtattaaatgattgtgaattagaagtttttttgaatttattgttttggtatggtttagtgtttgtagtggttgcgtgttttaggggatagaatatggtttttagttacgtagatttggattgaggtttagtattgttcgaataattatttggttttggtaagttataaagtttattatttattaaataatgtgttttaggtggcgggtgtttatgtttgtaattttagtattttgggaggttaaggtagatggattatttgaagttaggagtttaagattagtttggttaat

SEQ ID NO: 21 - DNA, 11049 bp, Artificial Sequence
  chemically treated genomic DNA (Homo sapiens)
tgtttgaagtgagtattaaatattttagaagtgtgaattttatgtatttgagtttttttagttgttgttggttttttttttgttgttaatttgtgatttataaatgattaggattttttgttttttaattttagggttttgttttaggatttaaattagtaatttggtgattataaggtgttgaatgtgttggtaattatatcgtaatatattttaaggaaaaggtttagatttttatttttaaaatatttttattttttttttgaattttatattcgtttgtttattcgtatatgtttagtttatagaaggggatatatattatgaaatggttatttttttgaagagaatattttgtttgaaatgtaaaggattgaaagagatttgtaggttgttgattttgttattttatattggaatttttaaaaagattttattaaataaagttttgttttttatttttaattatatgaatgtttttaaattttgttttaggtagaaggtattattgtgtttttgaagtatatgataatttgttaattttgtttaattggtatattgtaagaaattattttgagttttttataattaatgaaataatatgtattatgatgattgtaattttagatttttaatttaataggaaatagaaaatttgatttttttattagtttgaattaaatgaagttgttatttttgtaggttaaaaatggttgaatattagtaattttatatagtttaattgaatattttagagaagacgtaggtaggaagaattaagaggaaaggagaaaaatgtaaaataaaataagaaattaaaggatagggagatatttagaaaaataggatgagttatttagattattgattataattaatttttataaaagttttgatttgttttaagtttggtttttaagtttggttttttagttattaagagtataatgaggtttgagtttagtgagattatttttttcgtagaagttgtaagtaagagttattgtatattttttttagaagattagtaaaatttttttgatatttgattttttggttagtttttaggaattttatagatatagtgaaagtttaaatattggttttgtatttataagttatattatttatagtgatataggtaagttaaggttaattttttttttgtgtttatttttttattagtaaagtgggggtaatagtatttattttataaatgaatttgaagaataagttaatatatgtagtgtttagaatagtgttttgtagataggaagtgttatttaagagtttgttattattttaaaagatgtgaattttattatttagagtttttagagagagttttttagatagtattttaaggagttaattttttttaaattatatatgtattttttagttgttgtttttttaaaagaatattttatatttaagaatgttgttttatttttttgagatagagtttcgttttattgttaaggttggagtgtagtggtgttttttgtaattttcgtttttcgggtttaagtggtttttttgttttagtttttcgagtagttgggattataggtatgtattattatgttcggttaatttttgtatttttagtagagattgggttttattatgttggttagggtggtttcgagttttcggttttaagtgatttgtttgtttcggttttttaaagtgttgggattataggcgtgagttattatgtttagtttttgttttggttttaaaagtatttataatatttaaatgtttatgttggttatttatttttatttagtttataggtagaaaaaaaaaagtttatttagattaaattttgtagtaatttttttttttattgttattattgttaaagaattgtgtgttattattaggttaagttggtgtagtatttaaaatatttgttaatttgtttttttttagattggaggggtttaggtagtttttttaggatttattatattttgtattttaattttattaataatatttttattttttttgtattagcgatttatttaataaattaaattatatattattattaggttagtttttaaatagtttagtagtaataagaataataagatgttggtcgtattttaattttattggtagaaattgagggttttattggtgaagaaatttgtttaggattatagtgttttagttttttagggttattataataaaatattatagatagggtggcgtaaataatagaaatttgtttttttatggttttggaaattagaagtttaggagtaggtaggtttggttttttttgaggtttgttttttttatttgtagagggtcgtttttttattgtgtttttataaggttttttttttgtgtttattatttttggagtttttttttgtggtttaattttttttttttataaagatattagttaaattggatttagggtttattttaatggtttcgttttaatttaattatttttaaacgttgtgtttttagatagttatattttgaggtatttaggtttttatagatgaattttggaggatataatttagattataatataaggtaatatatggtttagatgagatttgaatgaatgattagtttaatttttaagtagatttttttagtagattgtaaggtgtattggagagttttagattagaggtttaagaggttatttaggtaatatttatagaattgttaagtgttaggattgggggatgtagtagttacgaaaatcgtttttcgttttagtaagtttatagtttattatggggaagagataaatattgaataggtagttatattatttttagtaaaataataattgggaatagtttttggggattattttatatatggaggaaatgtaaaaaatattttgttaggattatttttgtagtaaattagatgtgattaggttaattaaatatggttattgtgaattattttattgagtatagaagtggttttgttaaaaatggatttttttacggagtacggtggtttatgtttgtaattttagtattttgggagattgaggtaggaggattgtttgagattagtttgggtaataaagtaagattttgttttaaaaaaaaaaaaattagggcgtggtggtgggggtttgtaattttaattattcgggaggttgaggtaagagtattatttgagtttgagaggtggaagttgtagtaagttgagattgtattattgtattttagtttgggcgatagagtgagattttgttaaaaaaataaaaaataaaaaaataaaaaaaattaatttttcgtatatttttgttataaagaagtttttaaaaaattgtttgtttttttaagttagtttttttattgagtttaaatttcgttttaatttgaataaatatggatgttaatattattttttatagttattagtgttaagtgcgttgtatgtaatattttgaatatttattgaagtttgtaaggttggttttatgttttgattattgatggagatataaattttgaataattgtgattttagggatgttaaatattatagtgaggtacgatgcggggatttgaattttggtttgagggttttagagttgtggttttttttggggttattttgttaattgatttttagttttttttgatttataagtcgcggtattataatttttagatgttgaagaaaattaaattatatgttaaggattaaggtttgtgaatttttaaaatttgggataggttttagttaatttagaaagtttattttgttaacgttaaggacgcgtagttgtgatatagttttaggaagtttagatgatatgtgtttaaggtggttggggtatagattggttttatatattttagggagataggagatattaattaatatatgtaagtatattggttttttttagaaaggtggggataattcggaagtaggaagggtttttaggttataggtagatgagagataaaaggttgtatacgagtttttgataagtttttttaaaggagataattagaatatgtatttattttagtgagtagaaggatgattgattagaatgggaggtaggttttgttttgagtagtttttagtttgattttttttttttgtttagtaattttgggattttaatatttttataggttttaaattttattattttttagttattacgtgttagtatataaataaatagtataaaattaagaaggtatttattttttggttgtttttttacgtgtaaaataatattttgtgttaagtatttttatatacggcggcgtaaaggtagaaatcgatattaaaaaagcgtgtagaaaatagtttttagtttgggtaatatagggagattttatttttataaaaataattcgttaagtatagtggtgcgtatttgcggttttagttatttgagaggttgagatgggaaagttgtttgagttcgggtagtaggagttttaggttgtagtgagttaagaatgcgttattggattttagtatgggcgatagcgtgagattttgttttaaataaaaataaaagttcgttattttattaagaaggcgtttttgtatattgttttaatgtttaacgtttttaggatgttagcgtgacggaagtaagtaattattaaggtattattattggcgttaaattttttattttcggagtgttgtaagcgtagaaaatatacgttatgtgcggaggcggagttttcgttttgcgcgtcgtattagacggaaatcgagcgggtttattttttatgggtttgcggatttattagcgaaggcgggaggtgtcgtagggatattttttggttgttttcgtcgtttgcgtggtttttgtatttcggttttttattagcggcgtagacgtttgggtttaagcgttgggcgaggcgaggttttgttttttttcgttaacggttattttttggatttgtttttttttcgggaggcggtgatagttgttgagacgtgttgtagttagagttttttcgttttaatgcgtttttattagtgtcgttttttattggaaaatcgtggtttttgtattatttgttatttttgttgtgtaggagtagggagggttttttttcggggttttaggcggcggtgtagttcgtcgtagaagaattagagtagaagttgtcggggttcgtttttaggacgtagtcgttttatgggggtttaggggttttggaagttgttggagtgtttcgggcggtaggttagtttcgaagcgttggaagggaagattttggttgttggtatttttaacgtcgcgttgggatttggggtgtagggattcggggttggatttttcgcggggttttgttttgggtatagtggtatttgtaggatgatggttttgggtcggggtcggggtcgttatagaatttttgttattaggttttttaagtatagtcgtttttcggtattttcggggttttggttttagtttttttttcgtatattacgatgtttaagtttttttaatttttttatataatggcgtggtatttgtatataaattatttattttcgtaattttttaaatcgtttttagtttatttgtaatgtcgaatgtaatgtaagtgatttgtaaatagttgttatattgtattttaaaattttttgtagtttttattggtatgttttatttatttatttttttttatcgtaaatatttttgattcgtggtaggttgattgcggaatcgggtgatgaggcgggtcgttttgtttgttttttttagttttgtagttttagcggtttgtgtattttggtttgttattttgtggtagtgttttatgtttttttttgttttagtttttttatttgtaaagtagaggtggtgatagtatttatatataggattggaatgaggaataaagaaattgtttatatgagagaagtttagtgcgattaatatagtaaattttaaagttattattttgttcgggaggttagtaaggagagtagagtagatttcgacgattagttttgtttgagttttgttttatttatgttttttagaggaaggatagtgtggataggtgttttatttattttttaaattgattttttaaggattattgtttttgtatatgtttggttggttttgtttgttattggaattaaattttttttttattagtaaaacgtgatattgtttttgaaatttttatttttttttttgttatgtagttattttttttttttttttgagtatttattttggtttagaatttggtgatattttatattaattttttaaatggggatttatgagtttaggggttcgtgggtttgtggaaagagttttgtaaatgattgcggggggattggggacgggaaatggagtgtaagagtgtgtgggcgtttagtaaaggaatttttgattgtggagttttaattttttagtaggtataaaatttataaataaaacgatattgataagttttaaaatataatgagattattattttttgtaagtgaataatttttaaataaatttgtaattgatttttggtttaaaagtttttatatagggtattttgaattggggaaagttaaaggatttttgttttgttttgttttgttttttgttttttagagtatatgcgttgttgttgtttttaagttgttgtttagtattattgtagtttaaagatttttttagaaataaagggtaaaggttagtttttagtgataagaatttttaaaattttagtaaagatttagattattttatgtagtagtttttgtgaagaattattaaagaggattgtggttaggtttagtggtttacgtttgttattttagtattttgggaggttaaggtaggaggattatttgagtttaggagtttaagattagtttgggtaatatagtgaatttttgtttatatatagttaaaaaattagttggacgtggtggtttgtatttttggttttagttatacggaaggttgaggtaggaagattgtttgggtttaggcggttaaggttgtaatgagtcgtgtttatgtttgtttttgaataaataaataaaaaggattgtgaaagatattttagttatgataattttatatatttataataaattcgtttatgttaaaggagtatatttgattatttgttttataatcggttttgttttattttatttttacgggaatttagatatttgaaattatttagattttattgtattgtttgttaatgataaatttattcgttattatattagttttataatttatttttgtatttttatattaaattgtttggtttttaaattatttatatagtttagtgttttatttatatagtttaaatgtttgtgttaaataatgtagaagtaagttaaatttttgttttttatagattttaatgtttgtaatatgcgtttaagtgtattagtaagatattattatttttttaggttatgtatattaatggagatttttaagttatttaattaaagaattaaagaaatttattttttgtattgaaatgttattggtttttgggttttatatcgaaagtgatttttggttttgttgtagattttaatttttttgttcgtagaaatttaattttgcgtatataaatttattgaaattagataagttaaattatataaatatttttagattgttttattttttatattttttgtttaataatttatgtgaatatttttaggtcgtttaattttatatattttatttttaagaatttaagttaaaatttttaattttagttgagaattggtattatttgtagttaattgaaaaataaaaaataaaagaagttttattttagtttttatgatttagaattttaggtttatggggtttaataattcgtatgttttagaagttttatattttattttaatggatagtagggatgagagttattgatttgaaattagatttttttattgaagttaaagtttaaagtagtgggttaagtagaaattaatttaattttatgtaatagtgagttttatggtttttttagattatatttgtagtaagtagaaatatcgatttaatataagatagatgtatattaatattaagttttatttttgagatgtattttttattcgattttttttcgtggtttttattattattgtttgcgttaatttgggttattgtaatttattttagaattggtttttttataatttgttttttatatgtttattaaagttatttttaaattatgttttagaaattttttagtggtcgtattattttttgttattttttttgttttgttgtattggttttttggagatagggatcgtttttgttttgtttatggttgaattgtttggtgtatatttttagggttttggatatgtttggtttatggtattgttaaatattatagaaataagtatagtagtagtttgttttttattaggtattttgttatatagtgttttgtaaattaattgttgatggatttatatttttttttatgttagtaaaagttaggtagtgtatatttatttaaatattaaattgtttaatttatttaatagtagatatttattgtgtataagagtttttgtgaaagggagtgtagtgtataaattgttcgggtaagttatggagtatataggttgggttttttttttgttagattataaattttatagggttaatattgtgttttgtttagtgtattggatatgttagtgtatagaaaaaatgttgttatataataaaaatagaaataacgtgataggtggtttttttaatgttttttttttatgttagaaatttatttgtaaatattagtattagtttaggtttttttttgttttttttttttttttgtttttttttgagatagagtttttttttgttacgtaggttcgagtgtagtggcgtgattttggtttattgtaattttcgttttttaggtttaatcgatttttttgttttagttttataggtatacgttattatgtttggttaatttttgtatttttagtagagataggattttattattttggttaggatggtttcgattttttgattttaggtggtttgttcgttttggttttttaaagtgttgggattataagtgtgagttatcgtattcggttttaatatattttttaaataggaatgtatataaggaggatgtttttatttagattgaggaggggatttttggattgagattttagagtaggagagaattaggcggagagagggagaaattgttttaggtagaggaagtagtatgtgagaagaatttggaggtaggaaggagtttagtgatttttgggtttgaggaaagtttagtagtaggaagtgagtagaggttagattatttaaggttttttagattaggagaagaagttttagatagtattttgaaggtagtgggaagttttggagggtttttattaaagatacgttggtgaaatttagtatatatttttaagatatattagaagatagaattgatagatttggtaatagttataggtggtgatgtttagtattttggtttaggtgaatggtagggatatttattgagatgggggtatgagtagttgagtggagaagatatggagtttagttttgattatgttaagtttgaaatgtttatgaggtatggggtagagacgttatttgggttttttgttttggggttaggagcgtgttttgggttagatatatatatggagttagggcgtggtgtatgtggaggggagtggaggttgatagtttagataggaggaaagaagagggtttgagaaagattattgatgaagtgaatattttaatagtgttataggagttggtaaagagtttgagagtaggaaaattagtagagcgcggtgttatttttttttttggataaatataatattttttgagaagtattttttagaaaagtttaaaaatataagaaaattttaagatgaaaatataagttatttttagttttagtagatataatatttattttaatattttggtatgtgaattagttttttatatttaatatatatattgtattagaaaatggagttatattttatatggttttatagtttgttttattatttttaataatatttaatgattattttttttattatatatgtttttgtaatttttatttttaagggttttttggtattttagtaaataggtttgttataattagttttttttttttgagacggagttttgttttgttattaggttggagtgtagtggcgcgatttcggtttattgtaatttttgttttttgggtttaagcgatttttttgttttagttttttgagtagttgggattataggtgcgtattattatgtttagttaatttttgtatttttagtagagatggggttttattatgttggttaggatggtttcgattttttgatttcgtgatttatttgtttcggttttttaaagtgttgggattataggtgtgagttatcgcgttcggtttatgattagttttttaaaaagatttgttggaaaatttttaagttgatttttatatttttattattataaataagtattttgtaaataatttttattatatatttatgatgattttttgaggattaatgtttggaagtggtaaaatagattgtaaagttttaaaaagttttttttattatgaattgttaaattgttttttagaaaatttgtgttaatttatgaaaattttttagtaattatttatttttttttaaagaagtaattttttgtaatgagattttttaaaaggatatgtttgtttttgtatgattttaaaatgtagtatgtgaataggggtaataagagtttaattaaaagttaattgattttaggtagattttatgagagttaaatgttttttaattttaaatgaatagtgataagtatttagtgtttaacgtttggataatattagttattaggaaattgaagttgtgaggatgaagagaaaaatttcggagttttttttattaataatttttttaga

SEQ ID NO: 22 - DNA, 11049 bp, Artificial Sequence
  chemically treated genomic DNA (Homo sapiens)
tttgggagaattgttaatggaaaaaatttcgggatttttttttttatttttataattttaattttttaataattgatattatttaaacgttgaatattaaatatttattattatttatttaaaattgaaaaatatttagtttttatgggatttatttaaagttagttaatttttagttgaatttttgttatttttatttatatattgtattttaaaattatataaagatagatatatttttttaagaagttttattgtaaagaattgtttttttaaaaaaaaataagtgattgttaaagaatttttatgaattagtataaattttttggaggataatttgataatttatagtgaaaaaaattttttaaaattttgtagtttattttattatttttagatattgatttttagaaaattattatggatatataatgagagttatttatagaatgtttgtttataataatgaaaatataaaaattaatttaaaagttttttagtaggtttttttaaaaaattaattataggtcgggcgcggtggtttatatttgtaattttagtattttgggaggtcgaggtaggtggattacgagattaagagatcgagattattttggttaatatggtgaaattttatttttattaaaaatataaaaattggttgggtatggtggtgcgtatttgtagttttagttatttaggaggttgaggtaggagaatcgtttgaatttaggaggtagaggttgtagtgagtcgagatcgcgttattgtattttagtttggtgatagagtaagatttcgttttaaaaaagaaaaattaattatggtagatttatttgttggaatattaaaaagtttttaaaaatggaagttgtaggagtatgtgtgataaggaagatagttattaaatattattaaagatagtaaaataggttataaaattatataaagtataattttattttttgatatagtatatatgttaaatataaaaaattagtttatatattaaaatattaaagtagatattatgtttgttgagattaaagataatttatatttttattttgaagtttttttatatttttaaatttttttaaaaagtgttttttaaaaaatgttatatttgtttaaaagaaagagtgatatcgcgttttgttggtttttttgtttttagattttttgttagtttttgtaatattgttaaagtatttattttattagtgattttttttaggtttttttttttttttttgtttgaattattaatttttatttttttttatatatattacgttttgattttatgtatatgtttggtttagagtacgtttttgattttagaatagagagtttagatgacgtttttattttatattttatagatattttaaatttaatatgattaaaattgaattttatgttttttttatttagttgtttatgtttttattttagtgaatgtttttgttatttatttgagttagaatgttgggtattattatttatagttattattaggtttattaattttattttttaatgtattttgaaggtatatattagattttattaacgtatttttggtgaaaattttttaaagttttttattgtttttaagatattatttaaaatttttttttttggtttaggaagttttgaatgatttggtttttgtttattttttgttattgggttttttttaaatttagaaattattaagtttttttttgtttttaggttttttttatatgttgttttttttgtttgaaatagttttttttttttttcgtttagtttttttttattttaaggttttagtttaggggttttttttttagtttagatgaagatattttttttgtatatatttttatttaaaaaatatattgaggtcgagtgcggtagtttatatttgtaattttagtattttgggaggttaaggcgggtagattatttgaggttaggagatcgagattattttggttaaaatggtgaaattttgtttttattaaaaatataaaaattagttaggtatggtggcgtgtgtttataaggttgaggtaggagaatcgattgaatttgggaggcgaaggttgtagtgagttaagattacgttattgtattcgagtttgcgtaatagagggagattttgttttaaaaaaaaataaaaagaaaaaaaaaatagagagaaatttggattgatgttaatatttgtaggtaaatttttaatataggaaaagaatattgaaggggttatttattacgttatttttgtttttattatgtggtagtattttttttatgtattggtatatttagtgtattgaataaaatatagtattggttttatggagtttataatttagtagggaaaaaatttagtttgtgtgttttatggtttgttcgggtaatttgtgtattgtatttttttttatagggatttttatatataataaatatttgttattaaataagttgaatagtttagtatttaaatgaatgtatattgtttaatttttattaatataaaaaaaaatgtaggtttattaataattaatttataaaatattatgtaataaaatatttagtggaaagtaagttattgttatgtttatttttataatatttagtaatattatgggttaggtatatttaagattttagggatatatattaaataatttagttatgaataaaatagagacggtttttatttttaggaagttagtgtagtaggataaaaggaatggtaggaggtgatacggttattgggaagtttttagaatatgatttaaggataattttgatgaatatgtgaagaatagattataaggaaattagttttaaaatgagttataatagtttaagttaacgtagatagtagtggtggagattacgagaagagatcggataaaagatatattttagaggtagaatttggtgttgatgtgtatttgttttgtattagatcgatgtttttgtttgttataagtatagtttggaaaagttatgaagtttattattatataggattaaattagtttttatttggtttattattttaaattttaattttagtgaggaaatttagttttagattagtggtttttatttttgttatttattagaataggatatgaagtttttgaaatatacggattattaaattttatgggtttaaaattttaaattatagagattgaggtaggattttttttattttttattttttaattaattataggtaatgttaatttttagttagggttgagaattttggtttgaatttttagagatgaaatatgtaaaattagacgatttgaaaatatttatataaattgttagataagaaatatgaaaaatgagataatttgaaaatatttgtataatttgatttgtttaattttagtaagtttatatacgtaaaattaaatttttgcggatagaaaagttaaaatttgtagtaaagttaaaaattattttcggtataagatttaaagattaataatattttaatataaaaaataagtttttttagttttttagttaggtgatttaaaaatttttattagtatatatagtttaaagagatggtaatattttgttaatatatttaaacgtatattataaatattaaaatttataagagataaaagtttaatttatttttgtattatttgatatagatatttagattgtataaataagatattaagttatatagatggtttaaagattaaataatttagtatagagatataagagtaaattatgaaattagtataataacgggtaagtttgttattaataaataatataataaaatttaaataattttaggtgtttgaattttcgtgaaaatgaaataaagtaaaatcgattgtagaataagtaattagatatatttttttgatataaacgagtttattataaatatatgaggttgttatgattagaatgttttttatagttttttttatttatttatttagagatagatatgaatacggtttattgtagttttgatcgtttgggtttaagtaatttttttgttttagtttttcgtgtagttgggattaaaggtgtaggttattacgtttagttaattttttgattgtgtgtagataggggtttattatgttgtttaggttggttttgaatttttgggtttaaatgatttttttgttttgattttttaaagtgttgggatgataggcgtaagttattgagtttggttatagttttttttagtaattttttataagggttgttatataaaatgatttaaatttttgttgaagttttaagggtttttgttattgaaaattaatttttattttttatttttgagaaaatttttagattgtaatgatattaagtaatagtttgagggtagtaatagcgtatgtgttttaaaaaataaaaaataaaataaaataaaataaaaattttttggttttttttaatttaaagtattttgtataaaaatttttaagttaaaaattaattatagatttatttaaagattatttatttgtaaaaaatgataattttattatgttttaaaatttattaatgtcgttttatttataagttttgtatttattgaagaattagggttttatagttagggatttttttgttgaacgtttatatatttttgtattttatttttcgtttttaattttttcgtaattatttataggattttttttataagtttacgagtttttagatttatagatttttatttaggaaattggtgtaaggtattattagattttgagttagaatagatatttaaaaaaaaaaaaaaaatgattatataataaagaaaaagataaaaattttaaaagtagtattacgttttgttaatgaaaaaagaatttaattttaatgataaataaaattagttaaatatgtatagaaataatagtttttaaaaagttaatttaaaaaatgggtaaaatatttgtttatattattttttttttaagaaatataaatggggtaagatttaagtaaaattaatcgtcgaagtttattttgttttttttattgatttttcggataggataataattttaagatttattgtattaatcgtattaaattttttttatgtaggtaatttttttattttttattttaattttgtgtgtagatattattattatttttattttgtagatgagagaattaaggtagagaggaatataaagtattgttataaagtgataaattaggatgtataggtcgttaagattgtaaagttggggaaagtagatagggcggttcgttttattattcgatttcgtaattaatttattacggattaaaaatatttgcgatggaaaaaaataaataaataaaatatattaataaaaattataaaaaattttaaaatatagtataataattatttatagattatttatattgtattcggtattataagtaagttagaaacgatttaaaagattacggaagtgggtagtttatatgtaaatattacgttattatataagggagttgaaggaatttgaatatcgtggtatacggaggaggggttggaattaaagtttcggggatatcgagggacgattgtatttagaaaatttagtgatagagattttatagcgatttcgatttcgatttaagattattattttgtagatgttattgtgtttaaggtagagtttcgcgaggaatttagtttcgaatttttgtattttaagttttaacgcggcgttaaggatattaatagttaggatttttttttttagcgtttcggggttgatttgtcgttcggagtattttagtagtttttagagtttttggatttttatgaggcggttgcgttttaagagcggatttcgataatttttattttaatttttttacgacggattgtatcgtcgtttaggatttcgggaggaagttttttttgtttttatataataaagatggtaaataatatagaagttacggttttttagtgggggacggtattaatgggagcgtattaaagcggagagattttggttgtaatacgttttagtagttgttatcgtttttcggaagaaagataggtttagagaatggtcgttggcggggaggggtagggtttcgtttcgtttagcgtttaggtttaaacgtttgcgtcgttaatggaagatcggggtgtaagggttacgtaggcgacggaaatagttagaagatgtttttgcgatatttttcgttttcgttggtgggttcgtaaatttatgaaaaatgggttcgttcggttttcgtttaatacgacgcgtagggcggaagtttcgttttcgtatatgacgtatattttttgcgtttgtagtatttcggaagtgagaagtttagcgttagtggtgatgttttggtggttatttgttttcgttacgttggtattttgaaggcgttaagtattaaaataatgtgtaaaagcgtttttttggtggagtaacgggtttttgtttttgtttgagatagggttttacgttgtcgtttatattggagtttagtggcgtatttttagtttattgtagtttggaatttttgttgttcgagtttaagtaatttttttattttagttttttaagtagttgggatcgtaggtgcgtattattatgtttggcgaattatttttgtagaaatgaggtttttttgtgttgtttaggttgggaattattttttatacgtttttttagtatcggtttttatttttgcgtcgtcgtgtgtgaagatatttaatataaagtgttgttttatacgtgaagagataattaaaaggtggatgtttttttggttttgtattatttatttatatgttagtacgtagtaattaaagaataataaaatttaaagtttgtgaaaatgttagggttttaaaattattaagtaaaagggaaaagttaagttgggaattgtttagggtaaaatttgttttttattttagttagttatttttttgtttattgagatagatgtatattttgattgttttttttggaaaggtttattagaaattcgtatgtagttttttgttttttatttatttgtgatttagaagttttttttgttttcgagttgtttttatttttttggaaggaattagtgtatttatatatgttgattgatgttttttgtttttttaaaatgtataaaattaatttgtgttttaattattttgggtatatgttatttggattttttggggttgtgttatagttgcgcgtttttaacgttggtaaaataaattttttaaattaattgagatttgttttaaattttgggggtttataagttttaatttttgatatatagtttagttttttttagtatttaaaagttataatgtcgcggtttgtagattagaaaggattagaaattaattaatagagtaattttagaaaaggttatagttttggaatttttaggttaagatttaaattttcgtatcgtgttttattatggtgtttagtatttttgaagttatagttgtttagaatttgtgtttttattagtaattagggtataaaattaattttgtagattttagtaagtatttaaggtgttatatgtaacgtatttagtattagtaattataaaggatagtattagtatttatatttgtttaaattggaacgaaatttaaatttagtgaaaaggttgatttaagggagtaggtaattttttaaagatttttttataatagaagtatacgggaaattgattttttttatttttttattttttatttttttgatagggttttattttgtcgtttaggttagagtgtagtagtgtagttttagtttattgtaatttttattttttaggtttaagtgatgtttttgttttagtttttcgagtagttgagattataggtttttattattacgttttgatttttttttttttgagatagggttttgttttgttgtttaaattggttttaaataatttttttgttttagttttttaaagtgttggagttatagatatgagttatcgtgtttcgtggagaaatttatttttagtaaaattatttttatgtttaataagatggtttatagtggttatgtttggttgatttagttatatttaatttgttataggaataattttgataaagtgttttttgtattttttttatatgtaaagtaatttttagaaattgtttttagttgttattttattgagagtaatataattgtttgtttagtatttgttttttttttatggtaaattgtaaatttattgaaacgaagaacgattttcgtgattgttatattttttaattttggtatttagtagttttgtaaatattgtttaaatgattttttaagtttttagtttaaagttttttagtgtattttgtagtttgttgaaagaatttgtttggaggttaggttgattatttatttagattttatttgaattatatgttgttttgtgttatggtttgaattgtgttttttaaaatttatttgtggaagtttgagtattttagaatgtgattatttgaagatatagcgtttaaaaatgattaaattgaaacgaggttattaggataggttttaaatttaatttgattggtgtttttgtagaaagaggaaattgggttatagggagagattttagggatgataggtatagaggaaaggttttgtgaggatatagtgagaaggcggttttttgtaggtgaaggagataggttttagaagaaattaaatttgtttgtttttggatttttagtttttagaattatgagaaaataaatttttgttgtttacgttattttgtttgtggtgttttgttatggtagttttgagaaattaagatattgtgattttaggtaggtttttttattaatgaaatttttagtttttgttagtaaaattagaatgcgattaatattttgttgtttttgttgttgttgagttatttaagaattgatttggtaatggtgtataatttagtttgttgagtgaatcgttggtataggaggggtgggagtgttattggtaaagttgagatgtagaatgtgatggattttagaagagttgtttgagtttttttagtttgggagaagataagttggtaagtattttgggtgttgtattaatttggtttaatgatggtatatagttttttaatagtaatagtagtagggaaaggaattgttgtagaatttgatttaaataaatttttttttttttgtttgtgagttgggtaaaaataaatagttaatataggtatttgagtattgtaagtatttttaaaattaaagtaaaggttgggtatggtggtttacgtttgtaattttagtattttgggaggtcgaggtaggtagattatttgaggtcgggagttcgagattattttggttaatatggtgaaatttagtttttattaaaaatataaaaattagtcgggtatggtggtgtatgtttgtaattttagttattcgggaggttgaagtaggagaattatttgaattcgggaggcggaggttgtagagagtattattgtattttagttttggtaatagagcgagattttgttttaaaaaaataaagtaatatttttgaatatgaaatatttttttgaagaaatagtaattaaggggtgtatatgtgatttaaaaggaattagttttttaagatgttatttaaagggttttttttaaagattttgaatagtaaaatttatattttttggaataatagtaagtttttaaatagtattttttatttataaagtattgttttaaatattatatgtattagtttattttttaaatttatttataaagtagatattattatttttattttattaatgaggaaataggtatagaaaaaaaattaattttaatttgtttatattattataggtgatatagtttgtaagtgtagagttagtatttgaatttttattgtatttataggatttttaagagttgattaagaaattaaatattaagggaattttattaattttttaagagaagtatgtagtaatttttgtttatagtttttgcgggaaagataattttattaaatttaaattttattgtgtttttaataattggaaagttaaatttggaagttaaatttagaatagattaagatttttataaaaattgattatggttaatagtttgaataatttattttgtttttttaggtgtttttttattttttaattttttattttattttgtattttttttttttttttttggttttttttatttacgttttttttgaaatatttagttgaattgtatgaaattgttaatatttaattatttttgatttataaagatgataattttatttggtttaagttaataaaagaattaaattttttattttttattaaattagaaatttaaaattatagttattataatgtatattgttttattaattataaaaggtttaagatggttttttataatgtattagttgagtagaattgataaattattatgtattttaaagatataatggtattttttatttaaaataaagtttaaaaatatttatataattaaaagtagaaaataaaattttatttgatgaaatttttttaaaagttttagtatgaagtaataaaattaataatttataaattttttttagttttttgtattttaagtaaaatattttttttagaaaaatgattattttataatatatatttttttttgtaggttaggtatgtacgagtgaataaacggatataaaatttaagaaaaaaatgaaaatattttaaaaataaaaatttgaattttttttttgaggtgtattgcgatatggttattaatatatttagtattttgtaattattaagttattgatttgagttttggaataagattttaaaattaaagaataagagattttagttatttgtgagttataggttggtagtagaagaaaaattaatagtaattagaggagtttaaatatatgaaatttatatttttgaaatatttaatatttattttaaata

SEQ ID NO: 23 - DNA, 11049 bp, Artificial Sequence
  chemically treated genomic DNA (Homo sapiens)
agtgatgttttttgattgagttttttattattttgaatataagagattataatagttaggtaggagtagtatagtttttatttagtttgaagaagttatagaagatggatttttgtttttttattattttttggattaggcgtttttttgtaaaagggaagggagaaatatgttagaggtatttgaattagagtgattttattttgaattggggttgggtgaaataaggttgagatttattgagttgtatttttaagagggtaggtattttaagttataggatgaggtaggaggttggtataagatataggtgataaagattttgttgattaaatagtttgcggtaaagaagttggttaaaatttacgaaaattaagatggtaatgaaagtgatgtttggttatttttatttttttttatatgttaattataatgtattagtatgttaagagatatttttattagtatatgatagtttataaatgttatggtaatattagaaagttattttatatggtttaaaaatgggaagaatttttagttttgggaattatttattttttttttagaaaatttaggaataatttattttttttttagtatataattaagaaataattataagtatttttattaagtagtttaagttgttgttttgtttatggagtagttattttttatttttttatttttttaataaatttgtttttattttattttatggatttgtttcgaatttttttttatttaaggtttaagaattttttcggtatttggatcgggaattttttttggtaatagtttataatggatggttttatatatttattgtttttaagtttgttgatttatttatttaatatatatttaatatgtttttttagtggttgttaatatagttttaaataatatgtttttgttttttttttgatttataatttttataaagtatttattgtgtttttaatatatttaattattttttatgagttttttttatttataaggattagagaattaaatcggttttgttgtattgtcgttatttagaagttttgaaaagtgagagttaatttagatttttgttttgtaggttattgggagaattttttatattgaatacgaaatgtgaaataaaggcgtaaggatgaatatcgttatagttaaataagttaatattagtaaagtatttaagataatgaaattatttttgtaaaaattatattagttagaaaattatgatagtgaaagaggtttgagttaacgtttttattttaatatttattttgttttttttttaattatttttaagttattggggttagttaattttgagagatatttaggttatagtttatatgataatagattttgtttgaaatttaattgtttttgtaaagttaatgggaagttattaggttgtgggggaggagaggagtttgagttttgttaaggcgtagatatgaacgattgttagttattattttggaggttataagatatttaatttttttaattatttttgtaaataatattattgatatggtttggttgtgtttttatttaaattttattttgaattgtagtttttataatttttatatgttgtgggaggaagtcggtgggagataattgaatcgtgagggtggttatttttatgttgttttgatagtgagtttttacgagatttgatggttttataaggggtttttttttttttttattttgtatttttttttgttgttattatgtgaagtaggatatgtttgttttttttgttattatgattgtaagtttttagaggtttttttagttatgtttaattgtgagttaattaaattttttttttttataaattatttagttttgggtatgtttttattagtagtacgagagtagattaatataattattatttgtagttttttgagatatttttttaggttttttgtatgtttgatatttatggttttatttggatcgttaattttatttttatagttttatttagaagtgatttagattgtaggaggatagttttgattttttttatgattttattttagttttaattaattagtagtaagtatttgttatttggttatttttatttttttttttaaattgcgtttgaaaaatttttagtttatgagtttcggattttggattagatgatttgagtatgtattttattttttatttggtatggtcggtttcgtgtttattaagttttttttttattataatgttatggtttttttttatgtagtgggtaggaagaattttttgggtggggtgtttaaaataatgtttagtttagagtaagggttaggaaatggtagggaaaatggattaaaatttaaattaataattattataataatgatattagaaatattggtttgggggtatataggagatgtaagagtttattgttgttagagggtaggggaaagttttagaaaagagaaattttgtttgagtttggaatgggtaagagaattttaagtagagggatttgtttgtaagattatagaagtgatagaataataagtaggggtatgtgggaaaagattaataattgttttttttttaaagttttagtttatagtttgtttatttttgtggtataaatatttttattatggttgattttaagttattaatgtgaagttaataaaggtagagttggtgttatgggttaaattgggtgttttttaaatttatatgttgaatttttaatttttaatgtgattatttggagatagggtttttaggtagtaaatttggttaaatgagattataagggtgagtttttaatttaatacggttgatgttttagaagaaagggaagatagagttttttttttattttatgtaaggatatagtgagaaggtaattatttgtaagttatgaggagagttttttttaaatgagttaaatttgtttgtatttgattttggattttttagtttttagaattatgagaaataaatgtttgttgtttaagttgtttagtttatggtatttgttatggtagtttgagttaaggtagttgggaagaggtgaatagtatgtttgttaggtcgtagaagttaattgtagtatattttttttgggagaagagtaagtagttttttaaattttgagtataggtatttagggagtgaaggatataagtgatgtagaaaaattagatggggtaggagtataaaagggtttggacgatttgttaaataatttgggattttatttaattaaatttttttattaaagattttatttttaaatatagttatattttgaggtttcggggtgggggtggggagtggcggttaggattttagtatatgaattttggggaggggatataattcggtttttaatagttttagttgtgttattttgagttgtttttttgaatttcgtttacgtttttgtaaataataatttttaatttttttttttgagtggattatttttttttgtttaaattttgatataggaagggtttttaaaatagttgtaaagggaattttagttttaaaagttgggatttattatatatttgtttttatttttaagtattgaaattaatgttaattaattgtttttttatttttaatattttatttaagaaatcgttagaatttttttttttttaaaaaaaaaaaaaagtaagttataagtcgggcgtggtggtttatatttgtaattttagaattttaggaggtcgaggcgggtggattatttgaggttaggagttcgcggatagtttggttaatatgacgaaatttcgtttttattaaaaatataaaaattagttgggtatggtggtaggcgtttgtaattttagttattcggtaggttgaggtaggagaatcgtttgaatttgggaggaggaggttgtagtgagtttatatcgtgttattgtattttattttgggcgataagagtaaaatttcgttttaaaaataaaaataaaaataaaataaataaaaaaatttattattattaataaaaataagttatattgtgggttggggtcgttgataggaggaataagatgatgttatggagtattttttagtttttttttcgattttatttttttattgttcgattttaggtttttaagtgaggatagtattttttaggtagtgattcgtagttattgtttttttagaggacgttttgtttcgcggttttggaaagtttatttttttttagtatcgattttgagttgagaagttttgtttggtatagttattttgtatcgtgggttgtttttttttttaggcgaagtttaatttttttttattgttttgaatttttgtgtggatattttttttttttaaacgtattacggtaaaattttcgtttgtttcgaaatttcgtttatttttgagatttgaggacggatattaaacgttggatttaaggtaatgtatatatgtaagtaggttttgtaggtatttatttcgtttaggtgcgcgcgtggcggagggggaatagagaagtaggatagttttttatttttttcgtgtttagtcgtgggagataataagagaggttatagtttggcgattaaaaagtgcggttaatttttttgtttaagttgattttttttgtagggtttaaggttaattgtgaggatttatattcgtatggtatattcgtatttttttttacgtggaaatatgttttaatttttataattgttttgttagtagggtatttttcgttaggggcgaagcgtttttcgtaagttatttagttgatcggtagcggagatagttttttcgttttgttcgtacgtaagtagaaaggcgttgttgagttcgtttttttaaattacgtggttttgttcgtgtttaaaaataaacgttgagttaggcgtatgcgttacgggttttttcgtattagtagaagtcggagtcgttgttgggggcggtgtttatggttgagttgagggcgtaggcgttacggttcgtcgagttgggttttaaggcggttggcggcggtagcgtttttgtttttttgtgggcgttcgcgcggttttgggtgagtgttcgggggtttcggtcgaatgtcgggtagggggtgtcggggtttagtttaggtttttcgggcgggtcgcggtttcgcgttttggtttcgtcgtggtgattgagtttgttagcgaggacgtattgtagcgggttttagggttaagtgttcgttttcggcggttttatttgagatcggaagtagcgttaaggagcgtttatttgaggcggtttgagtttttggtcggttagcgatttagttattttttcgattttgtataaggttttttgcgcgtagggttagttgggttttttttgatttcgattaaaatgttggagttgttattttaaagagagtcgggttagatgtacgttcgacgttttgggcgttgatagagttaaattgataagagtgtgggcggatgaggtaggtcgtttgtaaatgttgttgttacgtgatttttacgtagcgttttaattgttgttattttgtgataggtagttttcgtttttttttttaattttttttattatttttttgttgttttgttttttttaatttattattcgtatagttgtttaggtggtttttggtataaagtaggttatgttattattagtttatttaatagtttttagagttattttattgtattgggagtggaatttatgttcgtgtttttttaggttttgtgtgatttggtttttgtttgtttttttttagaattgtgtttgtgttcgattaattttttaaatgagatttagtttgtttttggttgcgggagttttagtgatgggggaggacggtgaagatattagtgttttagatgattaagttttagaagatattttgtaagatttaggttatgaacggagtttttttttgttttttttaatttaaagttaaaaataaagttaaaaattcggtgttttagtttttttgtatttttataagtgtattagttttttttagttttaaaagttacgtacgttgttgggaggtcgaggtgggtggattattcgaggttaggagttcgagattagttttattaacgtggtgaaattttgtttttattaaatacgaaaaattagtcgggtatgatggtatatgtttgtaattttagttaatcgggaggttaaggtaggagaatcgtttgaattcggaaggcggaggttgtagtgagtttggcggagtttggcggaggttgtattttagtttgggtaatcggagcgaaatttcgttttaaaaaaaaaaaaaattttatacgttgtttttttgtaagacgtttattttattttcgatttgattgatttattagatgttattttattagagaggtttttttgattttatatttatttttataattttaatttggttttttttattttgttagaaagttttgtattttttttttaatagtagttattataattatatttgtgtgtgtgtgtgtgtgtgtgtgtgtatgtgtatatatatatatatagtttttaaatgtttgttttttttatgagattttaagttttttggggataggaattagttaatttagtatattgtttggtgtaattaatttttagtaattatttgttaaatgtatgatttttttttttttttttttttttttttttgagacggagttttgttttgtcgtttaggttggagtgtagtggtgcgatttcgtttattgcggttttcgttttttgggtttaagcgatttttttgttttagtttttcgagtagttgggattataggcgcgcgtttttatgtttagttaatttttgtatttttagtagagacggggttttattatgttggttaggttggtttcgaatttttgatttcgtgattttttcgtttcggttttttaaagtgttgggattataggtatgagttatcgttttcggtaaatgtatgatttattttatttttgaaattttttaatttgataagagttttttggtttttaatttttatttttagaagatttggttttttggttattgttagatattaagtgattttttgaatttttttttttatttttaggttttttttgtttttttgtttgtttgtttttgtttttttaaatttatttagtttggattttgaagttagttgttttagttattttttttagtatttttaatttcgtgatttttttgcgttattatttttgttttgaaaatttttaatagtgatattttttttaggattattgaaggaggagattgtttagttttggagattgttagtagtttatggttttgtagggttggggagatttttaggtaggttttttatagtaattattagtgtttgttttttgttaattttttttttttttgtataggatatttattttagatttttagtttttagttttagtgttaattttgttttttgatttaggaattgtttaatttgttgttttgtgggatattttgtttgtaatttattttagttttttttttttttatttgtaaatttagatttattaggaattttttttttgttagagttcgagaaagatgtgttgtgttttttgtttatttttgtttgcgattttttatttttgttgttttttttggtatatttttttgggttattttttttgtttttttttagttattacgtgttttagttttttttgttttagttttttttttatttttaataaatttattattattttattattgtagttgtttttttgttagaggtaagttttttaaaggataggttatttttttgtggtttttatttttttatttattttttatatattaattatattttaattattatagtttggtttttggttttatcgttttattgaaatttttttattttttcgagatagagttttatttttgttgtttaggttggagttttgcggtgtgattttagtttattgtaatttttgttttttgggtttaagcgattttcgtgttttagtttttcgagtagttgggattataggtatgtattattacgtttggttaatttttgtattttagtagagatggggttttattatgttgggttaggttggttacgaatttaggtgatttattcgttttggttttttaaagtgttgggattataggtgtgagttattaagtttggtttgaaattttttttattaaggtaaatggtgatttattggtatttaaatttatttagtttttttttatttattggacgttttttttttttttttattattagaagttttttttaaatttttttatttttaattttgtttttatattataatattattgttttttgatattattttatagaaatagaaaaatggttatttaatatttttggttgaattggtattttttttttttaaaaagaaatttttatgtgtgtataaataagaaaaatgaaaatagaattgttaattgttagttagtatagatattttgagttggaattttgttttttttgttggaaagtgaggtgagttgagttttttttttgaaaataattagtaggttttaaaagaaggaatttttttattgtgttgtttattttttaatttttttaatgttagttttttcgtattttttaaaatgattttaggtatttgttagagttttgggaattttggaattgtttattttgttgatgtgtttatatgttatttagatttttttttgagtttagatttgtatttttgattgtatgttgtaaatggtattgattatatgtaagttgtttgttagttttgttttttatttgttttttttttgagagttttatttttgtgattgaatttattggtgatttatttgtttagattaaattttttattattttagatttagttttgaattttatttttttttagtagatattgagtattttttatatattagattatgtatggtttatgtgtttaaattttagttttttcgtgatattttttgggttttagatattatatatagttcgttcgatgttcgtgtgattttttgttcgtgtttcgggttagttgatttgttttgttttgttgttaattgatatgttgttgttttagtggatagttattcgggtgtagatgatgttgaattttttgtatttcggtgttttattgttgggtttattttatttaataagggatgagtggggtttattgggggaatttgttatttaatagaaaagttatagtgtttaaagaaattttatttatagttaaataaaaagtaagattgatttttggttatcgttttgttttttaatatatttattagatgtgatagttgtataggtaatatagtgaatatattttttttaaagtagtaggttttgagtatgtggagtataatgtgaatatttttttttatttttttttgtgtttttttttttttattttgatttgtaggtttagtttgtattttgttagattattttgtgtgtaggatagatattttttttagtataagtgtgtttatattatgaatttttttatttaatatggtttttatattagtatatagaatatatttagtagttatattaaattattaaaaatgtgttgtattaaatatttttgtatttgtgtgtgattagttttttggaataaatatttagaattgtttgataaaggttatgtgtttttaatttaatagatattgttaagttgtttttataaggggttttattaatttatatttttagtagtattatgtgaggggggatttttttttttgtttgtattggatttatttattaggttttgaatttttgttaatttgatgggtgagaaattatattgtgtattaaaatggagttttttttttgtttttttttttttttttttttgagattgagttttattttgttgtttatgttggaatgtagtggtgagattttattttattgtaattttcgttttttgggtttaagtgatttttttgttttagtttttcgagtggttgggattataggtgtttattattatatttagttaattattgtatttttagtagagatcgggttttattatgtttgttaggttggttttaaatatttgattttaagtaatttgttcgttttagttttttaaagtgttgggattatagatgtgagttatcgtgtttagtttatttttgagaatattttaattaattttttaaaaaaattttaaatttattttataaggttttgtttttttgtttaggttagagtgtagttgtgtaattatggtttattgtagtttttattttttaggtttaagtgatttttttgttttagttttttgagtaattgggattataggtgtatattattaggtttggttaaggttttaaatttttagtagagataaggttttattattttttttaggttggtttcgaagttttgagttcgttgtgtttttttggttggtttttattttttcgttttggttttttaaagtgttgggattataggattgagttacgtgtttggtttaattaattttttgagtttttgatttgtttaaagtttttatttattggataggtatttagtttaggagtttttagttttagatttatatagaagtttttttttaatatcgttgtttttatgtattatagttgattttgttattatattataaattatttgtgttataatgaaatgaagatgttaatttggaaaatagtagttaaatgattttagttgttttgaagaatattttatggttattattttaggattttggtggttggtttttttagttggttgtttaaatgttttttgttgatgatattgtatttttttttttggttaattttttttatttattattagaatttaagaagatacgttgtttttttttagtaaattaatatttggaaatttgaatttatgtagttggaagattattatttgattttttgagaaattagtttgttttaattataaaatatttaagaattataatgaattttatataacgaaaaggtttataaatttttttttttttagg

SEQ ID NO: 24 - DNA, 11049 bp, Artificial Sequence
  chemically treated genomic DNA (Homo sapiens)
tttaaaaggaaaaaaatttataagttttttcgttatataggatttattgtagtttttaaatattttataattagagtagattgattttttaaaagattaagtaataattttttaattatataaatttaagtttttaagtattaatttattaaaaagggataacgtatttttttgagttttgataataaataagaaaaattaattagaaaaagaaatgtagtattattaataaaggatatttaggtagttagttaagaaagttagttattaaaattttggggtgatggttatggaatattttttaaaatagttgaagttatttggttgttgttttttaagttagtatttttattttattatgatataaatgatttataatatagtggtaagattaattgtaatgtataggaatagcgatgttaggaaagagtttttgtgtgaatttgagattagaaatttttaggttgaatatttatttagtaaataggagttttgaataaattagaagtttagaagattaattaggttaggtacgtggtttagttttgtaattttagtattttgggaggttaaagcgggaggatagagattagttagggaaatatagcgagtttaggatttcgagattagtttgggaaagataatgagattttgtttttattaaaaatttaaaattttagttaggtttggtgatgtgtatttatagttttagttatttaaggggttgaggtaggaggattatttgagtttgggagatggaggttgtagtgagttatgattgtataattgtattttagtttgggtaaaagagtaagattttgtaaaataaatttaaagtttttttaaaagattaattaaaatatttttaaaaataggttgggtacgatggtttatatttgtaattttaatattttgggaggttgaagcgggtagattatttaaggttaggtgtttgagattagtttggtaaatatggtgaaattcgatttttattaaaaatataataattggttgggtatgatggtgagtatttgtaattttagttattcgggaggttgaagtaggagaattatttgaatttaggaggcggaggttgtagtgagatgagattttattattgtattttagtataggtaatagagtgagatttaattttaaaaaaaaaaaaaaaaaaaaataaaaaaaaaattttattttaatatatagtataattttttatttattaggttagtaagaatttaaagtttgatagataaatttaatatagataaggagaaggatttttttttatatagtgttgttgagaatataaattagtaaagttttttgtagggataatttagtaatatttattaaattaaaggtatatgatttttgttaagtaattttaggtatttattttagagaattagttatatataggtgtaagaatgtttagtgtagtatatttttaatagtttaatgtaattattaagtatattttgtatattgatataaaagttatgttaagtgaaaaaatttatggtatgaatatatttatgttgaaaaaagtatttattttgtatatagaatgatttggtaggatataaattaagtttgtaaattaggatggggaagagaaagtatagggaaaaataagggggaatgtttatattgtattttatatatttaggatttgttgttttaaggagaatatatttattatattatttatataattattatatttaataaatatattaaaaagtaaaacgataattaaaaattagttttgttttttgtttaattgtgaataagatttttttgagtattgtaatttttttgttaaatgataagtttttttagtgggttttatttattttttattaagtaaaataagtttagtaataaagtatcgggatataaagaatttagtattatttatattcgagtggttatttattggagtagtagtatgttagttaataatagagtagggtaggttagttagttcgggatacggataagaggttatacgagtatcgagcgaattatatatggtgtttggggtttaagaaatattacggaggaattgagatttgaatatatgggttatgtatggtttgatatataggaggtgtttaatatttgttgaaaggaagtgaggtttagagttaagtttaaaataataaaaagtttggtttggataaatgagttattagtgaatttagttataaaaatgagatttttaaaaaggaagtagataggaagtaggattggtaagtagtttatatgtaattagtattatttgtagtatgtagttagaaatgtaaatttgagtttaagggaaagtttgggtgatatgtggatatattagtagagtgagtagttttagggtttttaaggttttgataggtatttaaggttattttggagggtacgaggaggttaatattggaaaggttaaaaagtgaataatatagtgagaaagtttttttttttggggtttgttgattatttttaagaggaaggtttagtttattttattttttaatagagagagtaggattttagtttagagtgtttgtattagttggtagttaataattttgtttttattttttttatttgtatatatatgaggatttttttttaagaaaaaaggatgttaatttaattaaaaatattaagtaattatttttttatttttgtaaaataatattaaaaagtaatagtattgtagtgtaaagataaggttaaaaataaagaagtttggggaaaatttttaataataaaaaaggaggaagagcgtttagtgaatgagaaaaggttgagtgaatttggatattaatgggttattatttattttggtaaaagaagttttaggttaggtttggtggtttatatttgtaattttagtattttgggaggttaaggcgggtggattatttgagttcgtgattagtttgatttaatatggtgaaattttatttttattaaaatataaaaattagttaggcgtggtggtgtatgtttgtaattttagttattcgggaggttgaggtacgagaatcgtttgaatttaggaggtagaggttgtagtgagttgagattatatcgtagaattttagtttgggtaataagagtgaaattttgtttcgaaaaaataaaaaagttttagtggagcgatagggttaaaaattagattgtagtggttgaaatgtagttggtgtgtaaggagtggatgaggaaatggaggttataagagagtggtttgttttttaaagagtttgtttttggtagggagatagttatagtgataaagtaataatggatttgttgggggtagggagagaattagggtaagaaaaattagagtacgtaatggttggagggagatagaggagataatttagaaaggtgtattaaaagagatagtaaaagtggaaggtcgtaagtagaaatgaataggaggtataatatatttttttcggattttggtagaaggaggatttttgatagatttaaatttgtaggtggaaaggagggaagttgaagtggattatagataaaatattttataaagtagtaagttgggtagtttttgagttaggagataaagttggtattggggttaaagattaagagtttggaataaatgttttgtataagagaaaagggagttgatagggaataaatattgatgattgttgtggaggatttatttgaggatttttttagttttgtaaagttatagattgttaataatttttagggttgaataatttttttttttagtagttttgggggaaatgttattattgagggtttttagagtagaaatggtagcgtaaaagagttacggggttgaagatgttgagaagagtagttgaagtaattgattttagggtttaagttgggtaggtttaaaaaaataaaaataaataaataaaaaaatagaaggggtttggaaatgggagaaagggtttaagaagttatttagtatttggtaatggttagaaaattaagttttttggaagtgagagttggaaattagaaggtttttattaggttaaagaattttagaagtgaaataaattatatatttgtcgggagcggtggtttatgtttgtaattttagtattttgggaggtcgaggcgggaggattacgaggttagaagttcgagattagtttgattaatatagtgaaatttcgtttttattaaaaatgtaaaaattagttgggtatggaggcgcgcgtttgtaattttagttattcgagaggttggggtaggagaatcgtttgaatttaggaggcggaggtcgtagtgagcgagatcgtattattgtattttagtttgggcgatagggtaagatttcgttttaaaaaaaaaaaaaaaaagaaagaaagaaattatatatttaataaatagttattgagagttaattatattaggtaatgtattaggttaattaatttttgtttttaaagagtttagagttttatgggaaaaatagatatttaaaaattatatatatatatatatatatatatatatatatatatatatatatataaatataattgtggtgattgttgttaagaggaaagtataaggttttttgataaaatgagagaaattaaattgaaattgtggaggtagatgtggggttaaggaggtttttttgataaagtgatatttgataagttagttaggtcgaaagtaaagtgaacgttttgtaaggaaataacgtgtgaaattttttttttttttgagacggaatttcgtttcggttgtttaggttggagtgtaattttcgttaggtttcgttaggtttattgtaattttcgtttttcgggtttaagcgatttttttgttttggtttttcgattagttgggattataggtatatgttattatgttcggttaatttttcgtatttagtaaagatagggttttattacgttggtaaggttggtttcgaatttttgatttcgggtgatttatttatttcggttttttaataacgtgcgtaatttttaagattagaaagagttgatgtatttgtgaaaatgtaagaaggttggaatatcgaatttttgattttatttttaattttgagttaagaagagtagagaagggtttcgtttatggtttaagttttgtagagtattttttaaggtttaattatttgggatattagtatttttatcgtttttttttattattggggttttcgtagttaggggtaagttgggttttatttggagggttggtcggatataggtatagttttgagaggggataggtaagggttaaattatataaggtttgggaaaatacgagtatggattttatttttagtgtaatggaatgattttgaaaattgttaagtaggttgatgatggtatgatttattttatgttagagattatttggataattgtgcggataatggattggaggagataaagtaataagaagatgatgggaaaagttgaggagaaaagcgagggttgtttgttataggatgatagtagttaagacgttgcgtggaagttacgtaatagtagtatttataggcggtttgttttattcgtttatatttttattaatttgattttattaacgtttaaaacgtcggacgtatatttagttcgattttttttaaaataatagttttagtattttaatcgagattaaaaaggatttagttgattttgcgcgtagggggttttatataaagtcggagaagtagttgggtcgttggtcggttagggatttaagtcgttttaggtgagcgttttttggcgttattttcggttttaggtgaggtcgtcggaagcgggtatttggttttaagattcgttatagtgcgttttcgttgataggtttaattattacggcgaggttaaggcgcggggtcgcggttcgttcgagaagtttgagttgggtttcgatattttttgttcgatattcggtcgggattttcgaatatttatttagggtcgcgcgagcgtttataaggaaatagagacgttatcgtcgttagtcgttttggaatttagttcgacgggtcgtggcgtttgcgtttttagtttaattatagatatcgtttttaatagcgatttcgatttttgttggtgcggggaggttcgtggcgtatgcgtttggtttagcgtttgtttttaagtacgggtaagattacgtggtttggagggacgggtttagtagcgtttttttatttgcgtgcgagtagggcgagaaagttgttttcgttgtcggttagttgggtggtttgcgaaggacgtttcgtttttagcgaaaaatattttgttggtaaggtagttatgaaagttaagatatatttttacgtagagggggatgcgggtgtgttatgcgaatgtaaatttttataattaattttgaattttgtagagaaagttagtttgggtagggaagttagtcgtattttttggtcgttaggttgtgattttttttgttgttttttacgattgaatacgggaaggatggagagttgttttgtttttttgtttttttttcgttacgcgcgtatttgggcggagtgagtgtttatagagtttgtttatatgtgtatattgttttaagtttagcgtttagtattcgtttttagattttagaggtaggcggggtttcgaggtaggcgagaattttatcgtggtgcgtttgaagaaagaagatgtttatatagaggtttagaataatgggaggaagttgagtttcgtttggggaaagaagtagtttacgatgtaggatggttgtattagatagagttttttagtttaggatcggtgttaggagaaggtggattttttagggtcgcgaggtaggacgttttttgggagggtagtgattgcgggttattgtttgggaagtgttgtttttatttggaagtttgaagtcggataatagggaaatggggtcggaaaggggattaggaaatgttttataatattattttattttttttgttagcggttttaatttataatgtaatttgtttttgttggtggtagtgggtttttttgtttgttttgtttttgtttttgtttttgagacggagttttgtttttgtcgtttaggatggagtataatggtacgatgtgggtttattgtaattttttttttttaggtttaagcgatttttttgttttagtttgtcgggtagttgggattataggcgtttgttattatgtttagttaatttttgtgtttttagtagagacggggtttcgttatgttagttaagttgttcgcgaatttttgattttaggtgatttattcgtttcggttttttagagttttgggattataggtgtgagttattacgttcggtttgtaatttgtttttttttttttttaaaggagaaagaattttagcgattttttggataaaatattaagaatagaaaggtagttgattgatattagttttaatgtttgaaagtaaaagtagatatatagtggattttaatttttgagattgaggttttttttgtagttattttggagattttttttatattagaatttggataggaaaaaatggtttatttaaaaggggaagttgagagttattatttataaagacgtgggcggggtttaggaaaataatttagggtggtataattggagttattaagggtcgaattgtgttttttttttaaaatttatatgttggagttttaatcgttattttttatttttatttcgggattttagaatgtgattgtatttgaagatagggtttttaatgagggaatttagttaaatgaggttttaagttatttagtaagtcgtttaagtttttttatatttttgttttatttaatttttttgtattatttgtgttttttattttttggatgtttatgtttaggatttagggaattatttattttttttttaggaagggtgtgttataattggtttttacggtttagtaagtatattgtttatttttttttagttgttttagtttaggttgttataataaatgttatagattgggtagtttaaataataggtatttgttttttatagttttggaggttgggaagtttaagattaaatgtaggtagatttagtttatttaggggaagttttttttatggtttgtaaatggttatttttttattgtgtttttatatggggtagagagagggttttgtttttttttttttttaaggtattagtcgtattggattagggatttatttttatgattttatttaattagatttgttgtttaaagattttgtttttaaatagttatattgagggttagggatttagtatatgaatttggggggtatttagtttagtttatagtattaattttgtttttgttgattttatattaatagtttgaaattagttatagtaggagtatttatattatagaaatggataaattataaattggaattttgggggagaggtaattattaatttttttttatatatttttatttgttattttgttatttttgtgattttataagtaggtttttttgtttagaatttttttatttattttaaatttagataaagttttttttttttgaagtttttttttattttttgatagtaataggtttttgtattttttgtgtatttttaaattaatatttttaatgttattattatagtagttattgatttggattttaatttattttttttattattttttagtttttattttaagttgggtattattttaaatattttatttaaggggttttttttgtttattgtataaagaaagattatagtattgtggtagaaaaagagtttaatagatacgaggtcgattatgttaggtgggagatggagtgtatgtttaggttatttgatttaaagttcgaagtttataggttgggggttttttaaacgtagtttggaggaaggggtgggagtggttaggtaataggtgtttgttgttgattggttgaggttgagatgaaattatagggggagttaaagttgtttttttgtagtttgaattatttttgggtggggttgtgggagtggggttggcggtttaggtggagttatgggtgttagatatgtaaaaaatttggaaagatattttaaaaagttataaatagtggttgtattagtttgttttcgtgttgttaataaagatatatttaagattgggtaatttataaaggaaagaggtttaattgatttatagttaagtatggttggggaggtttttggaaatttataattatggtgatagggggagtaaatatgttttattttatatggtggtagtaaggagaagtgtagagtgaaggagggggaaagttttttataaaattattagatttcgtgagaatttattattagaatagtatggaggtaattatttttacgatttagttattttttatcggtttttttttataatatgtagggattatggaaattataatttaggatgagatttgggtggggatatagttaaattatattagtggtgttatttgtaggagtaattgggaaagttgagtattttataatttttagaataatgattgataatcgtttatatttgcgttttagtaggatttaggtttttttttttttttatagtttgatagttttttattagttttataaaaatagttgagttttaggtaaggtttgttattatgtaaattatagtttaaatgttttttaaagttagttggttttagtagtttagaaataattaagggaaaggtaagataggtgttggaatgggggcgttaatttagattttttttattgttataattttttaattgatataatttttgtaaaggtggttttattgttttgagtgttttattaatgttaatttgtttaattatgacgatatttatttttgcgtttttattttatatttcgtgtttaatataaggaatttttttaatgatttatagaatagaggtttgagttgatttttattttttaaaatttttgggtaacggtagtgtaataaaatcggtttggttttttgatttttataaatggggaaaatttatgaaaaataattagatgtattggaaatataataaatattttgtaaaaattataaattaaaaaagaagtaaaagtatattatttagaattgtgttggtaattattagaaaaatatgttaaatgtatgttgaataaatgaattagtaagtttaaaagtaatgaatgtataaaattatttattgtgaattgttattaggaaggattttcgatttagatgtcgagagagtttttagattttgagtaagaaagaattcggggtaagtttatagagtaaagtgaaagtaagtttattaggagagtaaaggaataaagaatggttattttataggtagaatagtaatttgggttgtttgatgagaatatttatagttattttttgattatatgttaaagaaggggtagattatttttgagttttttaggaaaggggtgggtaatttttagaattgagggttttttttatttttaaattatatagggtaattttttgatattgttatggtatttgtaagttgttatgtgttgataggagtgttttttagtatgttaatgtattataattagtatataaggaagagtgaggatgattagatattatttttattgttattttggttttcgtgggttttggttagtttttttatcgtaaattgtttaattagtaaggtttttgttatttgtattttgtgttaattttttattttattttgtgatttagaatgtttgtttttttgggaatatagtttagtaggttttagttttattttatttagttttaatttaagatggaattattttggtttaaatgtttttgatatatttttttttttttttttataagggaacgtttaatttaaagggtagtagagggataaagatttattttttgtaatttttttaagttgaataagggttatgttatttttatttaattattatggttttttgtatttagggtagtgaggagtttagttagaaggtattatt

SEQ ID NO: 25 - DNA, 6583 bp, Artificial Sequence
  chemically treated genomic DNA (Homo sapiens)
atatgtaatttgtttaattgtatgtattatggagaaaaataaattagggaaaggaaaattaggtattttaaagtagggataggaattgtaattttaaatagtataattggagaatattttattgagaagaaatttatgtgtattattgagcgaagtaaaggattaagttacggggttatttgttggaagagtattttgggaagaaggaatagcgtatgtaaagttttagaggtgggagtgtatttggtatatttaaagaatggtacggaggttagatggttaaagtagagtgggtaagagtaagaagagtgggagttgaagttatatgtatatgaagttataagaatgtttatagaagtagtagtaatagaattttgaaattatttagatatttattaatagtggaatgaataaattataatgtatttatataatggaattttatattgaaatataaataaaaaataaattataggtgttttcgataatatagatgaattttataaatatgatgttgagtaaaagaggttaaatgttaaaggataaaaattgtattattttttttatatatattttataaacgaggtaatatttgtagtaaaaaggtagattagtagttaggatagagatatttgattggaaacgagttacgaagtgttttttgggagggattaagtagaagtaatatatgtttattttgtgataatttgtttaggatttatgttttttgtatgtatgttttatatatataatataatgtaatagtaatataatattattatttataatagtaaatggaggaatttgagataggaagtataggatttttttttttaaaaagttttacgataataggagtagagaaatgaggggaatattgaagggttattttaaagatggaagaaatgattgttacggaaagtttatttatttatatttattattgttgtaaaatatttgttttattgtttatttaatcgatttttaatttaaatttatttaaaaagtaagttttatgttaatattgtgttatttgttataatagaaataatcgtaaaaatataatggatataaagttattcgattaaaataatttaaaaatgtaaaaataattgaatgtaattaaaattaattaaattgagttgtaaaaatgagcgtttaaaaataagttatttaaatagaaaattagagtcgttgatgattagttagaagaaaaaggatattttgttttatatatatgtaatagttattagtattgtgtataatttttttatttttatttttatattgtatatatattgttttgaatatttatttatatttattttaatagaggagtaaaataaaaatttagttttatatgaggtgataagacgatgttgatttgtttaatatttgaggttgttttttgtttttatgtttttgatttggagggaagttgagttttagaaaaagttttttaatgttgttgattaaaaagaatttttatttttatgtttttttttagaaattattggtgtatgtattagtgtgtgtgtgtgtgtgtgtgtgtgtgtgtgtgtatgtgtgtgtgtggtggggaaggtgttgtttagttgtggttttagtaattttgtttgaaattaggtaaaggtaggaggttatttagagggtatttataatttttattaggttttaagttattggttaagttttatattgtagaaaatattgttttataataatggagatagtattttttaaattaaaaattaggtaatttgatattttaataagatatagtatttaaagataagagttggtcgggtacggtggtttacgtttgtaattttagtattttgggaggttgaggcgggcggattatttgaggttgggagttcgagattagtttgattaatatggagaaatttcgtttttatttaaaatataaaattagttaggcgtggtggcgtatgtttgtaattttagttatttgggaggttgaggtaggagaatcgtttgaatttaggaggtagaggttgtagtgagtcgagatcgtattattgtattttagtttgggtaataggagcgaaattttgttttaaaaaaaaataaaaataaaaataaaaaataaaaaaataaagataagagtagtttagaaaatttataataatagtgttatatttaggatatttatgtattagtttatatatttgaaatgtttaaaattaatattagtgttattgggatgtgaaaatttatagatataatttttgtttttaaagtaaggttgttagataaaattatagaatgttaagataaatttaaattttagataaatagggattttttttagtatatgttttaaatattgtattagatatattaaaaatttatttgttgtttatttgaaatttaaatttttgggtgttttacgttattatttgttaaatttggtaattttattttaaaaggtttttagtttattgaagggtaaagataatttaaatataatgagaatatgagaagtgttaggattaaagagttattatagaatgtttgtgtatattaaataaatatttaatttagggaagatatttggaaattggtaatattggaattgagttttaagttggaaatatatgggatatattatttattttagtatttaataatatgttattatgatttgtgatttaattgttttataaatatgtgttttgtttatagaattagattttaagttttttgaagatataggatatttttttatgttttttatgttatttggaattgataggtatatttaaggtagtagtaaattattgtatatattgatgtaaatggttttgtttttttaaagagtaaaaatattttgttagtgaaatgtattgtaattagtgtttttttttttaattttagtttttgaatattgtagttaagaatatagtttgaaattttgggagttaaatttatagtaaatatatgagtcgtttatagtgtagtaaatttttatgttagttttatgatagatttagtgatattggaatggatatttttttgattttggggtttttttttaagatttttatgtgtgatatatttatggttggattttaggtattgaagtagttattatagttggatagtttaatgagtgtaagaaggtttttttataaatatatgttgtttatatcgaagtttttttttaatttattgtagtttgaaattgttttttattttttttaagagtttattttaagttagtttagggttaggtttattatagtttttggaagagggagggaagataattttttttattttttttagttttagttttaaagattagaattagggagaaagtaatatagtttttttaaatatattttttaaatgtggtatttttttaataattttagtaataaatttaaggtattatagatgtttttaaaattggtatgatagatgttagagtgattataaaaagattttaaaagaggaaaagatgtaaagaacgtaattaaatggggagtatgtttaataatgtgtttatttttttttttttaattttttgaattgagtttgtattattatttttattgatttttgagtttagaatattattttgtggtttggtttaaggttttttttaattttttaaattataatatttttaagaggatagcgacgaggtttggggtgttatgaggattggaaatttagttataagtgattatgaaagtttaaaatgtttttaaagtttttgtttttaaggtttatttttaaggttttgttatatagttaattttttttcgatttatgttaaaaataaacgaagttgggttttaggtaaaatggtaggggtagattttaattattattattattgtaatggggaaaagaatttagcgtgaattgaatttaatttcgatttgtagaggtaatcgggcgttttaaagagaatgaaggaattaggatgggattgatgacgtcgagggggattgagtaatttttttaggtttgaaaagttttaatattaacgcgcgacggcgtttttttaatattagtttttagaattggggttgtagttaggagggaattataacgtttagtagtttcggcgggtgtaaacgtttttaattttcgaggcggtgtttattatcggttattagcgttagtgttattcgcgtttttaagaagtcgtacggagttcgggtcggtagtagcggttggagtcgtatggtagtgagtcgttgtttatttagcgagacggagagtttaggacgtaattttacgagttggaagtcgtaggaggcggaatcgggttgcgggatacgcgttgacgttatattttttgggcggggtcgtaaggaattcgcgtaaattgaaaggttagtttttcgcgcgttgtgtaggtaagttgttcgtgttttgcgttgtcggtcgtgggtgttttggttatagtgagttaggggcgtcggagcgggtttttttaatcgtaatcggtttcgtttaaggggaggaggagagttttttttcggaaggtgagaggagcgggttgtgcggaggttaatgggtgggtttttttgggggtcgatttgcgcgttattttcgatttttttttcgggattcgggttttttaggaagggaaggagagggtttggcgtgatttttttaatttaatagcggagtttttagtttgagtggagtatgtgttttgtttcgaggggacgtttggtaattagaggtttgtagtttagtgaacggagggagataagagagtagacgatttcgggttggagtaggcgttagggttgttagatttattttattttttcgtagaagttggtagtttaggttttatatgtaatttttttatttttaaatgttgataagtatatttttttataatattttgtagatttaaggaaacgtgtcgtttggaatgggtttgggggttacgtttgtatattttcgcgagatagagggataaagtgaagatggtgttgttattgttatttcgagtgttatatgcgatttttgagatatgtatatagttatttttattatcgtatttagttatttttattacgttaaagaagaaataattattcgaggatatttgtttggtttagaagaaatttatgtaaattttatgaattattatattcgtttttttcggagtgagagaaaattttttttagatattatttgagaggtaagagattgtttttttgaaattgtggtttgaggattatttgtatttagattaattgttttgtttaaaatttatttatagtagaattagtgaattttagttattgagtggagttgagagtttaagaatttttgaaatttgagaattgttggattagagtttttagagttttgataaggtgttaatagggtaaagttgttttttgattttgtattttttttttttttttttttttaaatttaacgtttgataggagagatttgtattatgaaatgttaagtaattgtttagtgtttattattgattttttattgtagagtggggggaggtcgttttattagaaagggttgtgatagttttagaatttttgtatagaaagggtttagggggttgtaatcggaatggaagggggtggaaagttaaagtatttgttttgaagttgtatttgtatagtagacgtagttttatagttttttagggtagtttttagagaggttgatggagttgtttttgggcgttattattgtttattattagaatgttcgtgtttagaataatgcgttttaatagtagtgaattttagttttaaaaaagtataggattatttttgtaattttttttgaattttttttttgttttttaattgaaatatttatttttttataaattgttttgagtttttatttttatttgaatttgtacgttgatttttatgattaatgttttttgtagaggtaatgcgatgttatcgtatgtatggttttgtttgtgtttggttttttgaagtatgtgttaggagtgaaagtgtaaaagtattttggaaagattaaataaataataagtaatagttaagtggtattagaggtagtattagtgattaatgtaaattttattttatggaaattgtttgatagggaggagtttagttaaaatattaaagagtagtgatttttgaatatttgaataatttttggtcgggcgcggtggtttacgtttgtaattttagtattttgggaggtcgaggcgggcggattacgagtttaggagatcgagattattttggttaatatggtgaaatttcgtttttattaaaaatataaaaaattagtcgggcgcggtggcgggcgtttgtagttttagttattgggaaggttgaggtaggagaatggcgtgaattcgggaggcggagtttgtagtgagtcgatataggttattgtagttttttttgggcgaaagagcgagatttcgttttaaaaaaaaaaataaaataataaattaatttttgtattggattttaagttttttttttatttgtttaagatgttttaataaatgtatttttttttaaatattattgttttttttgtttttttttatattagg

SEQ ID NO: 26 - DNA, 6583 bp, Artificial Sequence
  chemically treated genomic DNA (Homo sapiens)
tttgatatgaaaagagatagggagaatagtaatatttaaagaaaaatatatttattaaaatattttagataaatgaagagaaagtttggagtttaatgtagaaattggtttgttgttttgtttttttttttgagacggagtttcgttttttcgtttaggagggattgtagtggtttatatcggtttattgtaagtttcgtttttcgggtttacgttatttttttgttttagtttttttagtagttgggattataggcgttcgttatcgcgttcggttaattttttgtatttttagtagagacggggttttattatgttagttaggatggtttcgattttttgaattcgtgattcgttcgtttcggttttttaaagtgttgggattataggcgtgagttatcgcgttcggttagaaattgtttagatatttaagaattattgttttttaatattttagttgggtttttttttattaaataatttttatagggtagaatttatattaattattaatattatttttaatgttatttgattgttgtttattgtttgtttagtttttttaaagtgtttttgtatttttatttttgatatatgttttaaggagttaggtataaataaaattatgtatgcgatggtatcgtattgtttttataaagggtattaattataagggttaacgtgtaaatttaaataggagtagaaatttaaaatagtttgtaggaaggtaagtattttaattaaaaaataaaggaaaaatttaaaaagaattatagaaatgattttgtatttttttaggattgaaatttattgttattagaacgtattattttaagtacgaatattttggtaataaatagtggtggcgtttaggggtaattttattagtttttttgaaagttattttaaagaattgtgaaattgcgtttgttatgtaaatatagttttaagataaatgttttaattttttatttttttttatttcggttgtagttttttaagttttttttatatagagattttggaattgttataattttttttgatgaaacgatttttttttattttataataaaaagttagtaatgggtattgagtagttgtttagtattttataatataaattttttttattaaacgttaagtttggaaggaaagaaagaaagaaagtataggattaggaggtagttttattttgttgatattttattagagttttaaaggttttggtttagtagtttttaaattttagaggtttttagatttttaattttatttagtgattgggatttattagttttgttgtgaatgaattttaaataaagtagttaatttggatgtaggtggtttttaagttatagttttagaaaaatagttttttattttttagatgatatttaaaaagagtttttttttatttcgaggaaaacggatataatagtttatgaaatttatataagttttttttgggttaggtaaatattttcgaataattattttttttttagcgtagtaagaatggttgagtgcgatagtaagaatgattgtgtatatattttagagatcgtatgtggtattcgaggtaataataatagtattatttttattttatttttttgtttcgcggagatgtgtaggcgtggtttttaagtttattttagacgatacgtttttttaggtttgtaaaatattatgggaaaatgtatttgttaatatttaaaggtggagagattgtatgtaaaatttggattgttagtttttgcggaaaaatgaggtaagtttggtaattttggcgtttgttttagttcggaatcgtttgtttttttattttttttcgtttattgaattgtagatttttggttgttagacgttttttcggaataaaatatatattttatttaggttaagggtttcgttgttgggttgggaagattacgttagattttttttttttttttttggaagattcgaatttcgagaggagggtcggaggtgacgcgtaggtcgatttttaagggaatttatttattagttttcgtatagttcgttttttttatttttcgagaagggattttttttttttttttgagcggagtcgattgcggttggagaaattcgtttcgacgtttttaatttattgtggttagagtatttacggtcggtaacgtagaatacgggtaatttgtttatatagcgcgcgaaaggttgattttttaatttgcgcgggttttttgcggtttcgtttagaggatgtgacgttaacgcgtatttcgtaattcggtttcgttttttgcggtttttaattcgtagggttgcgttttgagtttttcgtttcgttgggtagatagcggtttattgttatacgattttagtcgttgttgtcggttcgaatttcgtgcggttttttgagggcgcgagtggtattggcgttgatggtcgatggtgagtatcgtttcggaagttgggagcgtttatattcgtcggggttgttgggcgttgtagtttttttttggttgtagttttagttttggaggttgatgttgaaagagcgtcgtcgcgcgttgatgttgaggttttttaaatttgaaaaagttgtttagtttttttcggcgttattagttttattttaatttttttattttttttaaaacgttcggttgtttttataaatcgaaattgaatttagtttacgttgggtttttttttttattgtagtagtagtagtgattaaaatttgtttttattattttatttagaatttagtttcgtttatttttgatataagtcggggaaaaattagttatataataagattttgaaaatgggttttagagataaagattttagaggtattttggatttttatggttatttgtggttaggtttttaatttttataatattttagatttcgtcgttgtttttttagggatattgtaatttaaaaaattggaagaaattttaggttagattataaagtaatgttttgggtttaaagattaataggaatgataatgtagatttaatttaaggaattgaaggggaagaagtgagtatattgttaaatatgttttttatttgattacgttttttatattttttttttttttaaagtttttttatgattattttaatatttgttatgttaattttaaaggtatttatgatgttttaaatttgttattaaaattgttgaaaaggtgttatatttggggaatgtgtttggaaaagttgtgttgttttttttttggttttggtttttagagttgggattaggagagatgagaaaagttatttttttttttttttttaaaggttatggtagatttaattttaaattagtttggagtggatttttggagaaagtgggggataattttaaattgtagtagattaaagaggaatttcgatgtgggtagtatgtgtttgtagagaagtttttttatatttattggattatttagttgtagtaattgttttagtatttagaatttaattatgaatatattatatatgggggttttaggaaggaattttaaaattaaaaaggtgtttattttagtgttattggatttgttataaaattaatatgagagtttgttgtattgtgaacggtttatgtatttattgtgaatttgatttttaaggttttaaattgtatttttggttgtagtgtttaaagattaaaattggaaaagaaaatattagttataatatattttattaatagaatatttttattttttgggaggataaaattatttgtattaatgtgtgtagtaatttattattgttttaagtgtgtttgttagttttaggtggtatgggggatataaagagatgttttgtgtttttaaggaatttaagatttagttttgtagataaaatatatgtttatgagatagttaagttataaattatgatggtatgttattaaatgttgaaataaatggtatattttatatgtttttagtttaagatttagttttaatgttattagtttttaaatgttttttttaagttagatatttgtttgatatgtataagtattttgtgatggttttttggttttgatattttttatatttttattgtgtttgaattgtttttgttttttaatagattgaaaattttttgaggtagggttgttagatttagtaaataataacgtaggatatttagaaatttgaattttagatgaataatagataaatttttaatatatttaatgtaatatttgagatatatattaaaagaaatttttgtttatttgaaatttaaatttattttggtattttgtaattttatttggtaattttattttgagggtagggattatgtttatgaatttttatattttagtagtattagtgttgattttaaatattttaaatgtgtggattaatatatgaatgttttaggtatggtattattattatgggttttttgggttgtttttatttttatttttttattttttatttttatttttatttttttttaagatagagtttcgtttttgttgtttaggttggagtgtaatggtgcgatttcggtttattgtaatttttgttttttgggtttaagcgatttttttgttttagttttttaagtagttgggattataggtatgcgttattacgtttggttaattttgtattttaagtagagacggggtttttttatgttggttaggttggtttcgaatttttaattttaggtgattcgttcgttttagttttttagagtgttgggattataggcgtgagttatcgtgttcggttagtttttatttttaaatattgtattttgttgaaatattaggttgtttgatttttaatttggaagatattgtttttattgttatagggtagtgttttttatagtgtggaatttagttaatgatttggggtttagtgagagttgtgggtgttttttagatggttttttgtttttgtttggttttaggtagggttgttagaattatagttgagtagtattttttttattatatatatatatgtatatatatatatatatatatatatatatatattgatgtatatattagtaatttttaagaagagatataggagtgggggttttttttagttagtagtattaggaagttttttttaaagtttaatttttttttaaattagagatatgggaataagggataattttaagtgttgggtaagttagtatcgttttgttattttatatgggattaggtttttattttgtttttttgttaaaatgaatgtggataggtgtttaaaatagtatgtatgtagtgtaaaggtgaagatgaaggaattgtgtatagtgttggtgattattatatatatatggaatagaatatttttttttttttgattgattattaacggttttggttttttgtttaagtaatttatttttaggcgtttatttttgtagtttaatttgattgattttgattgtatttaattatttttatatttttaaattattttaatcgaatgattttgtgtttattgtatttttacggttatttttattatggtaagtgatatagtgttaatatgaaatttgttttttaagtaaatttaagttgaaaatcgattaagtaaataatagaataggtgttttgtagtaatggtaaatatgagtaagtgagtttttcgtaatagttattttttttatttttaaaataattttttagtattttttttatttttttgtttttgttatcgtaaaattttttgaaaaaaaaaattttgtattttttgttttaaatttttttatttattattataaatagtaatattgtattattattatattatattatatatgtaaaatatatatatagaaagtataaattttaagtaaattattataaaatgaatatatattgtttttatttggttttttttagaagatatttcgtagttcgtttttaattagatatttttgttttaattattaatttgtttttttattgtaagtgttgtttcgtttgtgaaatgtatataaaagaaatgatgtagtttttattttttagtatttggttttttttatttaatattatgtttgtgagatttatttgtattatcgagagtatttatagtttgttttttgtttgtattttaatgtagaattttattatgtaagtatattataatttatttattttattattgatagatatttgagtggttttaagattttattattattgtttttgtgaatatttttgtaattttatgtgtatgtgattttaatttttattttttttgtttttgtttattttattttagttatttagttttcgtgttattttttgaatatgttaggtatatttttatttttagggttttgtatacgttgttttttttttttagaatgtttttttaatagatagtttcgtagtttggttttttatttcgtttagtaatatatataggtttttttttagtgagatattttttaattatgttatttaaaattgtaatttttatttttattttgggatatttaatttttttttttttgatttatttttttttatgatatatataattggataaattatatat

SEQ ID NO: 27 - DNA, 11131 bp, Artificial Sequence
  chemically treated genomic DNA (Homo sapiens)
tgggaaaatggagattaagaggtatgattataaatttagattgtaagtggtatatatatattgaatttagtttttttttttatttaaatttgaaatatttggtaaaggatgtttttataaattttaggaaggtatttattttattttaattttaaaggaacgtattatatagaggtggtattttaaaatgatagagaacgcgagttttggaagttagattgtttgtgtttataatttagttttattatttagtagttttgggatttggggtaaattttttaatattttattttttaggttttttaattaagaaaatggaggtaataataggatttattttataaagttgtggtgaggattataatgtacgtaaagtatttagaaaaaaagggtttgatatatggtaagtttttaataaatagtggttattaatatatttttagaatttattataaaaattaggaaataaattgattttttaaaggtttaaatgtatttaggaatgggaaattaatatatggttatttatagtattgggatatatttaattttaagatttgtgttgtttgaatgggatgaattagtaagattatgtttattttttttaagtgtttaattttagaaagtaatgattattagttttgttaattttttttttattaattttgtaaaaggtataaaagtaatatggaaaaaagaggtagagaagatagaagtagattagtatataaggtgatttttttagattagaatttgatgtgtttaatgaatgggtgatgtttttatgtttggttgaggtattttaggattttatatttatataaaagggcggggagtgggaagggggtaggtttattattttatttttagttatagtatttttttttttatttattatattttataaaagtttttttttagttttagtattaggttagatttttttttgttttagggttttggtaggttgattttttttttatttggaatattgttatttttttattatttttttgtggttattttttttttattttaaatttttatttttaaagttattatttttgatatttttatttaaaataggtttttttattgggtgtagtggtttatgtttgtaattttagtattttgggaggttgaggcgggcggattatttgaggttaggagtttaagattagtttggtaaatatggtgaaattttgtttttattaaaaatataaaaattagttaggtgtggtggtatgcgtttgtaattttagttattttggaggttgaggtaggagaattatttgaatttgggaggtagaggttgtagtgagttgagattattttattgtattttagtttgggtaatagagtaagattcgtttaaaaaaaaaaaaaaggttttttttgttattttttattatagtatttagtgtgttttttgtgtagaaggtatttatgtaatttgtaattaattatttatgtatttatttttaatgttttttttattagatagttttatgatggtaaagaatatttttgtttattatattaattttatttattttaatacgttgattagtatagagtagacgtttaataaatatttgttgaatgaatgaaataatgatttttaaggttttttttagttgtttaataattattaggtaataggataaaaaatatttagtgtaaagggggaggttttacgtggggtataggaaatatttgattttttattatgataaaaaaataaataattaaatggttttattttaagaagtttagttaaaatttgattgatgtgggttgggtatggtggttgacgtttgtaattttagtacgttgggaggttaaggtaggcggattataaggtgaggagatcgagattattttggttaatatagtgaaatttcgtttatattaaaaatataaaaaattagtcggttgtggtggcgggcgtttgtagttttagttattcgggaggttgaggtaggagaatggcgtgaattcgggaggcggagtttgtagtgagtttagatcgtgttattgtattttagtatgggtgatagagcgagatttcgttttaaaaaaaaaaattaataaaaaaaaaatatttgattgatgtaatttattaatgagtaatagtttttttagtgattttgtaagttttgtttttagatgtgttttaattattttaataattggttatttaggtttaaatttttgttaaataatgggttggttatataagaattagttgataagtttattaaaaatatagatttttggattaaaattttaggagattttgatttagtatttgtgaagttttagaatttatataattaaaatttttttattttaaatagatattatgtgtatgtaatatataggtttagaggtaagaaatagtttatagtaaagttttttttttatttttgtttttttggtattaagtttttttttttataagttattgttgttattaattttttgtgtatttttacggataattatttgtttaagtaagtatatatatattttttgatttgtatatttaaagagttattttaattttgttttttttaattttatttataatatatgttggaaatgagggtatttgtatttttaataagtattttagatgattttgatgtgaagttaaatatagaaataatttatggatttacggttgtgagattaagtttaatttattacgatatattagaaatttaaggatattgaaggatgtttttaaaagtagttttttttatttgatttttgttttttcgttttatagagatgaattaaattattcgttagtgtttttatagaagttaggaaaaattagttatttaaatggatgttgttaaagttttaatttttaataattggaatttttttttgtttattgttattcgaaattataaatttgataatttttgtgttatataagatatttttgtatttaagttgaaataaggtgtgatcgttattgaatgagggttggttttttttttgttagttaagtagtttaatggagtataatcgaaatattttttttattaatttttatttatatagttttatttaaattttttttaaaattgtttttttgttatttgagtaaaagtaattaatttagaaattgtggggagaagattgtttggtgaattttggagttcggggttttttttattttgatttgatttatttgggggcgatggttgggtttttaggtagttttattttttttattttatttatttttgggattgtaaagggagtttttttttggtattgagataaggtttttcgagagttattcgattttcgtagtgtttttgttattacgaggggtatcgcgcggtaggtatttttattttttttatatcgcgttaaggaggtaggagtgtattgggttattcgagcgaggtagagaattcgtcgggatttagcgttggtttattttatattttcgtcgaaggggttttcgagggttcggtttttgtttaagttttttgtaaggtggaggtatgatttttttattttttttttttgaatttaaacgtgaggatggtatttgcgaggttaaagcggggtttagatggtttaaattttagattatttttttttttattcggttttttttttatttttttggttatgtgttttttcgtgagtcgtggtttaagtttttttatttcggttagtcgttattttttggtttggttttcgtttttttgtttatttggtttttttttttttatttagtatgatggggttgagtcgtcgggttaggtttttggataggtcgtatacgtagagttttatcggatagagattcggcggttttattgggattcgtggcgacggcggttacgacggttttcgggtattcggtagcggtttggattttttcgtattcgacgggagtgcgaagcggagggagagggggggatcgagttcgggttcgggttgaggggtgggggagaggtcgttttgcgttgttcgcgtttttatattcgttatcggtaacgattattgtgaggtgatagagaggggatagggagggtttatacggaagagggggcgggggtagggatgtatttttgcgtatgtgtttatagttttgacgtaggaaggggcggggttttgtcgaagggggcggggttttcgttgatgggttggttttcgttagggatataggtagaagttggttggggagtgtgcgtgttagtttgacgcgatatagtgcgtatatgcgtgatgacgtagagggcgttgattgggatcgagtatagggttcgcgtatgcgtggattgtcgttttttgtttaagttggtcgtttttttgcgttaaaggtaagcgggtcgttatttatttgtgttgttcgttagttaggtttggtttcgtttcgtttcgttcggtcggtttcgcgcgtttttatagttttgttagagggttagcgttagttttaagtgtgcgaattcgaggagtagcgatagattcgagattacgtttttttttcgggaaggaggcggtatttcgcgtttgaggttcgtttgcgtttgaggttcgtttgcgtttgcggttcgtttgcgtttgaggtttgtttgcgtttgagattttattgggcgtgattgaggaatttggggaggtttttgggcggtattgaggacgagggggttcgttagttagtatagaattttggagcgggaattttttatcgtttaaatggcgtcgggggcgggattttcgggatttggttttcgcgggtcgtcgtcggttttgaaacgtgagggatagttgagatgaggtagttattgggatggtttttatgcgtatttatatgtagttcgattgtcgagttttcgaggtagtaggatttatcgtttatattttttattattaattaagtttttagaatagattttataagaatttagaggtcggtattttttcgatttaaatttgtttgttattgacgttaacgtttttcgtttagtgagtagtagttaatatgttagggtgggagttatattataaaatcgagggcgatgaagaagtagaggaagaataagaagagaattttgaagtaagtggtaagtgattttagtatgtagtgttattcggtgtgtggaagaaagattttttttgtttatttttgttggatggattttgttgtttgatggtttgtttttttttttttagataattttgaaatttttttttttttttgaatttcgtagagttattttaggtttttatatgtagattttattttagtgtgttttaagttttttttggatattggtagtttgatattttttggtttttgataaatggttatgattataggtattttttgttattttaagtggtttaggtgagattttttttatttaggaaagtagtgttattattttaggattttagtgtaaaaatgtttttattttgtaataattatattaattaaagaataaacgtaagtaatatagttataggaaagtgattgatttttttattatagtttttacgtttgggagtgtatgtgtaggtaatatagtaatatataaaataaaggaagagaaataggggtatatgtaatttttatattggttaatttaatttttgagtagaaaaattttgaatatttttattaaaaatgagaaacggttaggcgcggtgttttaagtttgtaattttagtattttgggaggtcgaggcgggcggattacgatgttaggagattaagattattttggttaatacggtgaaatttcgtttgtattaaaaaaaaaatataaaaaattagtcgggcgtggtggcggtcgtttgtagttttagttgttcgggaggttgaggtaggagaatggtgcgaatttgggaggtggagtttgtagtgagtcgagatggcgttattgtattttagtttgggtgatagaatgagatttttttaggaaaaaaaaaaaagtgagaaatataggaaatataaaaaagaaaaaaatttgttataatttattattttaatataattattattagtattttgatatttttgtattttttttttaagtattttttaatatttattttttaatgaaatatatatattttttaattttttaatagagataggttggagtgtagtggtgagattatcgtagtttattgtaattttaaattttcgggtttaagtgatttttttgttttagttattttagtagttgggattataagtgtcgttaatttttaataattttttaattttttgtagagataggattttgttatgttgattaggttggttttaaatttttggttttaagcgatatttttaagttttggttttttaaagttttaggtttatagttatgagtttttatgtttagattgtatttgatttttttttttttttttttggagatagttttgttttgtcgtttaggttggagtgtagtggcgcgattttggtttattgtaagtttcgtttttcgggtttatgttatttttttgttttagtttttcgagtagttgggattataggcgtttattattacgttcggttagttttttgtatttttagtagagacggggttttattgtgttagttaggatggttttgattttttgattttgtgattcgttttatttagtattttaaagtgttgggattataagtgtgagttattgcgtttggtttatttgattttttgtattgtaacgatagtgtatatatatttatttatttattgagatagagttttgttttgtcgtttaggttggagtgtattgatttaatttcggtttattgtaattttcgttattttagtttaggttatttttttattttagttttttaagtagttgggatgataggcgtgtgcgttattatattcggttaatttttgtatttttagtagaggtagtgttttattatgttggttaggttggttttgaatttttggttttaggtgatttatttatttcggttttttaaagtgttggaattataggtgtgagttattgtgcgtggtttatagtttattttaaatatattataatttggtcgggtgtggtggtttatatttgtaattttaataaatatattgtaatttgtttgggtgtggtggtttacgtttgtaattttaatattttgggaggttgaggcgggtagattatttgaggttaggagttcgagattattttggttaatatggtaaaattttatttttattaaaaaatataaaagttagttgagtttgtggtggtatgtatttgtagttttagttgtttgggaggttgaggtacgagaattgtttgaatcggggaggtagaggttatagtgagttgagattgtaatattgtattttagtttgggtaatagagtgaaattttattttaaaaaaaataaaataggggtcgggcgcggtggtttatttttataattttagtattttgggaggtcgaggtaggtggattataaggtcgggagatagagattattttgattaatatggtgaaatttcgtttttattaaaaaaatataaaaaattagttaggcgtggtggtaggcgtttgtagttttagttattttggaggttgaggtaggagaatggcgtgaattcgggaggtagagtttgtagtgagttgagattgtattattgtattttagtttgggcgatagagtgagattttgttttaaaaaaataataataaaataaaaaataaggtcgggcgcggtggtttatatttgtaattttagtattttgagaggtcgaggcgggtggtttacgaggttaggatatcgagattattttggtaaatacggtgaaattttgtgtttattaaaaatataaaaaaatagttaggcgtggtggtaggcgtttgtagttttagttattcgggaggttgaggtaggagaatggcgtgaattcgggaggcggagtttgtagtgagtcgagattgcgttattgttttttagtttgggcgatagagcgagatttcgttttaaaaataaaataaaataaaataaaataggttaggtacggtggtttatgtttgtaattttagtatttttggaggttaaggtgggtagattatttgaggttaggagtttaagattagtttggttaatatggtgagattttgtttttattaaaaatataaaataagttaggcgtggtagcgtatgtttgtaattttgttatttaggaggttgaggcgggagaatcgtttgaatacgggaggtggaggttgcggtgagttaagatcgcgttatcgtatgtttaaggtttttgatatatattgttattttgttttttaggagatagttaattaaatttattaagaagtagtaggttatgtatagtggtttacggttgtaattttagtattttgggagtaggaggttgaggtaggttattatttgaggtcgggagtttgagattagtttgattaatatgatgaaattttatgtttattaaatatagaaaatttgttgggtatagtggtatatgttcgtaattttagttatttggagatgattagatattatatatttttttaggaaaaaatatgttatttatgataaagttatgttgaagaaagaaaatttgaattagattaagtttttttaggtttttagtaggaaggatagaggattttgttaatttatattaaaagaggttaatcggtaggttaggtaaggtggtttatgtttgtaattttaatattttgggaggttacggtagaggatcgtttaagtttagaagtttaaggttgtagtgagttatgattgcgttattgtattttagtttgtgtgagagaataagattgtttttaaaataattaatttaataattttatttttttatttgagatggaatttttgtcgttaggttggagtgtagtgattaatttcggttcgttgtaatttttgttttttaagtttaagtgatttttttgttttagtttttttagtagttggaattataggtatgcgttattatatatagttaattttttgtatttttagtagagatggcgttttattatgttgtttaggatggttttaattttttgattttgtgatttatatgtttcggtttttgaaggtgttgggattataggtatgagttatcgtgtttggttatttatttatttttattttttttgagacgggttttcgttttgttacgtaggttggagtgtagtggcgcgattttggtttattgtagtttttgcgttttagatttaagcgatttttttattttagtttttatagtagttgggattataggtatgcgttattatacgtagttaatttttgtatttttagtagagatggggttttattatgttgtttaggatggttttaattttttgttttcgtgatttatatgtttcggttttttaaagtgttgggattataggcgtgagttattgtgtttagttaaaataattttttattttttatttatttttttgagatagagttttgttttgtggtttaggttggagagtagtggtgtgatttttgttttttgtaatttttgttttttaggtttaagtgatttttttgttttagttttttgattagttgggattataggtgggtattattatatttggttaatgtttgtttgtttttttttttgttttttttttttgagatcgagttttattttgttatttaggttggagtgtagtggcgtgatttcggtttattggaagttttttttttcgggtttatgttatttttttgttttagtttttcgagtagttgggattgtaggtgtttattattacgtttagttaatttttttttgtatttttagtagagatagggttttatcgtattagttaggatggtttcgattttttgatttcgtgattcgcgcgtttcggttttttaaagtgttgggattataggtgtgagttattgcgtttagtttaatgtttgtatttttagtagatatagggtttaattatgttggttaggttggtttcgaatttttgattttaagtgattttttcgttttggttttttaaagtgttgggattataggtatgagttattgtgtttcgtttaattaatttttttaaaaaggtaattagtaaaatttagaatgtggaaaagtgtataatataaagtattttggttttttagaagataaattataagggaaaaaagagagggtatttgtagatgaagaggttttagaaaattaagttaaagttaatgtttagaaatgtaggtttgggtgataaaattataaagaaacgtaaggggtgggtgtgtggtagattatgtttataattttagtttttaggttagggcggggtggggtgcggtggtttacgtttataattttagtattttgggagtttgaggtgggtggattatttgaggtcgggagtttaagattaatttgggttaatatggtaaaattgcgtttttattaaaaatataaaattagttgggagtggtggcgggcgtttataattttagttagttgggaggttgaggtaggagaatcgtttgaatttgggagacggaggtcgtagtaagtcgagattgtgttattgtattttattttggtaatagagcgagatttcgttttaaaaaaaaaaaaaaaaaaaaatagaggtttggtggggaggattgtttgagtttagaagttttagattagtttgggtagtgtagtataatattatttttatagtaaatttaaaaaattagttggttatggtggtatatatttgtagttttagttgtttaggaggttgagttaggatgatggtttgagtttaggagttcgaggttgtagtgagttattatcgcgttattgtattttagtttgggtgatgggagtgtgattttattttagaaaaaaaagttaggatattgatttttttggggaggtgggtgttgtaattgggagggaatgtaagagggatttttggggtgtttggtaagatttaattttttgatataggtggagattttatggttgtttattttataataatttattaggttatatttttttttatggtttttatttattttatatggtaaataaatacgaaaataaggataaatatttttttttatttttttttttatagg

SEQ ID NO: 28 - DNA, 11131 bp, Artificial Sequence
  chemically treated genomic DNA (Homo sapiens)
tttatggggaaaaaaatggaagaaaatgtttgtttttgttttcgtatttgtttattatataagataaataaaggttataaaggaaagtataatttaataaattattataaggtgaataattataaaatttttatttatgttaggaaattgagttttgttagatattttagaaattttttttatatttttttttaattataatatttatttttttaaaaaagttaatattttgatttttttttttgagatagggttatatttttattatttaggttggagtgtagtgacgcgatgatagtttattgtaatttcgaatttttgggtttaagttattattttgatttagttttttgagtaattgggattataggtgtgtgttattatgattagttaattttttaagtttattgtagagatggtattgtgttatattgtttaggttgatttaaaatttttgagtttaggtaattttttttattaggtttttatttttttttttttttttttttgagacggagtttcgttttgttgttagggtggagtatagtggtataatttcggtttattacgattttcgttttttaggtttaagcgatttttttgttttagttttttaattagttgggattatagacgttcgttattatttttagttaattttgtatttttagtagagacgtagttttattatgttggtttaggttggttttgaattttcggttttaggtgatttatttattttagatttttaaagtgttaggattatagacgtgagttatcgtattttatttcgttttggtttaagagttgggattataggtatgatttattatatatttattttttacgtttttttataattttattatttaaatttatatttttaaatattagttttgatttaattttttaaagtttttttatttatagatattttttttttttttttttgtaatttattttttgaagagttaagatgttttgtgttatatatttttttatattttgaattttgttgattgtttttttaaaaaaattaattaggcggggtatagtggtttatgtttgtaattttaatattttgggagattaaggcgggaggattatttgagattaggagttcgagattagtttagttaatatggttaaattttgtgtttattgaaaatataaatattaggttgggcgtagtggtttatatttgtaattttagtattttgggaggtcgaggcgcgcggattacgaggttaggaggtcgagattattttagttaatacggtgaaattttgtttttgttaaaaatataaaaaaaaattagttgggcgtggtggtggatatttgtagttttagttattcgggaggttgaggtaggggaatggtatgaattcgggagggggagtttttagtgagtcgagattacgttattgtattttagtttaggtgatagagtgagattcggttttaaaaaaaaaaaataaaaaaaaaaataaataaatattagttaggtgtggtggtgtttatttgtaattttagttaattaggaggttgaggtaggagaattatttgaatttgggaggtagaggttgtagggagtagagattatattattattttttagtttgggttatagagtaagattttgttttaaaaaaataaataaaaaataaaaaattattttggttgggtatagtggtttacgtttgtaattttagtattttgggaggtcgaggtatgtggattacgaggataagagattgagattattttggataatatggtgaaattttatttttattaaaaatataaaaattagttgcgtgtagtggcgtatgtttgtaattttagttattatggaggttgaggtgggagaatcgtttgaatttgggacgtagaggttgtagtgagttaagatcgcgttattgtattttagtttgcgtgatagagcgagaattcgttttaaaaaaaataaaaataaataaatggttaagtacggtggtttatgtttgtaattttagtatttttagaggtcgagatatgtggattataaggttaagagattgagattattttggataatatggtgaaacgttatttttattaaaaatataaaaaattagttgtgtgtggtggcgtatgtttataattttagttattagggaggttgaggtaggagaattatttgaatttgggaggtagagattgtagcgagtcgagattagttattgtattttagtttggcgatagagattttattttaaataaaaaaataaaattattgaattaattattttagaaatagttttgtttttttatataggttggaatgtagtggcgtaattatagtttattgtagttttgaatttttgggtttgagcgattttttgtcgtggttttttaaagtattgggattataggtatgagttattttgtttggtttgtcgattgattttttttggtgtagattaatagagttttttgttttttttattaaggatttagagaggtttaatttgatttaggttttttttttttagtatgattttattataagtaatatatttttttttaaaaaggtatataatgtttggttatttttaagtagttgggattacgggtatgtgttattatgtttagtaaattttttgtatttagtagatatggggttttattatgttggttaggttggttttaaattttcgattttaggtgatagtttgttttagttttttatttttaaagtgttgagattatagtcgtgagttattgtgtatggtttgttgttttttaataagtttaattagttgttttttggagaataaaatggtaatgtgtgttaagaattttaaatatgcgatgacgcgattttggtttatcgtaatttttatttttcgtgtttaagcgattttttcgttttagttttttgagtagtaggattataggtatgcgttattacgtttggtttattttgtatttttagtagagataggattttattatgttggttaggttggttttgaatttttgattttaggtgatttgtttattttggtttttaaaaatgttgggattataggtatgagttatcgtgtttgatttattttattttattttattttatttttgagacggagtttcgttttgtcgtttaggttggagagtagtggcgtaatttcggtttattataagtttcgtttttcgggtttacgttatttttttgttttagtttttcgagtagttgggattataagcgtttgttattacgtttggttatttttttgtatttttagtagatatagggttttatcgtgtttgttaggatggtttcgatgttttgatttcgtgagttattcgtttcggttttttaaagtgttgggattataggtgtgagttatcgcgttcggttttattttttattttattattatttttttgagatagagttttattttgtcgtttaggttggagtgtagtgatgtaattttagtttattgtaagttttgtttttcgggtttacgttatttttttgttttagtttttagagtagttgggattataggcgtttgttattacgtttggttaattttttgtatttttttagtagagacggggttttattatgttagttaggatggtttttatttttcgattttgtgatttatttgtttcggttttttaaagtattgggattatagaggtgagttatcgcgttcggtttttattttattttttttgagatagagttttattttgttgtttagattggagtgtagtgttgtaattttagtttattgtagtttttgttttttcggtttaagtaattttcgtgttttagttttttaagtagttgagattataagtgtatgttattatagatttagttaatttttgtattttttagtagagatggggttttgttatgttggttagggtggtttcgaatttttgattttaagtgatttgttcgttttagttttttaaagtgttgggattataggcgtgagttattatatttagataaattatagtatatttattgagattataagtgtgagttattatattcggttaaattatggtatatttaaaatgagttataggttacgtatagtggtttatatttgtaattttagtattttgggaggtcgaggtgggtgaattatttaaggttaggagtttaagattagtttggttaatatggtgaaatattgtttttattaaaaatataaaaattagtcgagtgtggtggcgtatacgtttgttattttagttgtttgggaggttgagatgggagaatagtttgaattggggtggcggaggttgtagtgaatcgagattgagttagtgtattttagtttgggcgatagagtaagattttgttttaataaataaataaatgtatatgtattatcgttataatataagaaattagataggttaggcgtagtggtttatatttgtaattttagtattttgggatgttgagtagggcggattataaggttaggagattaagattattttggttaatatagtgaaatttcgtttttattaaaaatataaaaaattggtcgggcgtggtggtgggcgtttatggttttagttattcgggaggttgaggtaggagaatggtatgaattcgggaggcggagtttgtagtgagttaagatcgcgttattgtattttagtttgggcgatagagtaagattgtttttaaaaaaaaagaaaaagaaattagatatagtttgggtatggaggtttatgattataaatttagaattttgggaggttaaggtttgggggtatcgtttgaggttaagagtttgagattagtttgattaatatagtaagattttgtttttataaaaaattaagaaattattgggagttggcggtatttgtagttttagttattgaggtagttgaagtaggaggattatttgagttcgggagtttgaggttatagtgagttacgatgattttattattgtattttagtttgtttttattaaaaaattaaaaaatatatatattttattaggaaataaatattgaaagatatttgaaagaaaaatataaaaatgttaaaatgttggtagtggttgtgttagagtggtagattatagtaaattttttttttttttgtattttttatgttttttattttttttttttttttgagagagttttattttgttatttaggttggaatgtagtggcgttatttcggtttattgtaagttttattttttaggttcgtattatttttttgttttagtttttcgagtagttgggattataggcgatcgttattacgttcggttaattttttgtattttttttttagtatagacggggttttatcgtgttaattaggatggttttgattttttgatatcgtgattcgttcgtttcggttttttaaagtgttgggattataggtttgagatatcgcgtttggtcgttttttatttttaataaaaatatttaaaatttttttgtttaggagttaaattaattagtatgaagattatatgtatttttatttttttttttttgttttatgtgttattgtgttgtttgtatatatatttttaaacgtggaggttatagtgagggaattaattatttttttgtaattgtgttgtttgcgtttattttttggttggtgtagttattgtagggtgggggtatttttatattgaggttttggaatggtaatattatttttttggatgagaagggttttatttgaattatttaagatgataaaaaatatttatggttatggttatttattagggattaaaagatgttaaattattagtgtttaaaaaaaatttagggtatattagagtaagatttgtatataagagtttagggtagttttgcgaagtttaaaggaagaaaagaattttagaattatttgggaggagaagggtaggttattaaatagtaaagtttatttagtagagataggtagggaaggttttttttttatatatcgaatggtattatatgttgaagttatttattatttgttttaaggttttttttttgttttttttttgtttttttatcgttttcggttttgtaatatgatttttattttgatatgttggttattgtttattaggcgaaagacgttaacgttagtaataggtaaatttaaatcgaaaaaatatcgatttttaggtttttgtgagatttgttttaaaagtttggttagtagtgaggaatgtggacggtaaattttgttgtttcgaaagttcggtagtcggattgtatgtaaatgcgtatgggggttattttagtagttgttttattttagttattttttacgttttagggtcggcggcggttcgcggaagttagatttcggaggtttcgttttcgacgttatttagacggtgagggattttcgttttaggattttatgttgattaacggattttttcgtttttaatatcgtttaaaaatttttttaaattttttaattacgtttaatgagattttaaacgtagataggttttaagcgtaggcgggtcgtaagcgtaggcgggttttaaacgtaggcgggttttaaacgcgaggtgtcgtttttttttcgaggaaggagcgtggtttcgagtttgtcgttgtttttcggattcgtatatttaaggttaacgttaattttttagtaaggttatgggggcgcgcgagatcgatcgagcgaagcgggacgaggttaggtttagttggcgaataatataaatggataacggttcgtttatttttggcgtagggaagcgattaatttggatagaagacgataatttacgtatgcgcgggttttgtattcggttttaattaacgttttttacgttattacgtatgtgcgtattatatcgcgttaggttggtacgtatattttttaattagtttttatttatgtttttgacgaaagttaatttattagcgagagtttcgtttttttcggtaaagtttcgtttttttttacgttaggattgtaagtatatgcgtaaaagtgtatttttgttttcgttttttttttcgtgtgggttttttttgttttttttttgttattttatagtagtcgttgtcggtagcgggtgtgggggcgcgagtagcgtagggcggttttttttttattttttagttcgggttcgggttcggttttttttttttttttcgtttcgtattttcgtcgggtacgggaaggtttaagtcgttgtcgggtgttcgagggtcgtcgtggtcgtcgtcgttacgggttttaatggagtcgtcgaatttttattcggtgaagttttacgtgtacgatttgtttaaaggtttggttcggcggtttagttttattatgttgggtgagggggaaggggttaggtgggtaggagggcgggagttaggttagagggtggcggttggtcgaggtggggagatttgggttacgatttacggggagatatatggttaggaggatggaagaaaagtcgagtggagaagagagtggtttgaagtttgggttatttgagtttcgttttagtttcgtagatattatttttacgtttgaatttaaggggaagggatggaggagttatgtttttattttgtagggggtttgggtagaaatcgagttttcgagagttttttcgacgagggtgtggggtaaattagcgttggatttcggcgggttttttgtttcgttcgggtagtttagtgtatttttgtttttttggcgcggtgtaggaaaggtgaggatgtttgtcgcgcggtgtttttcgtggtgatagagatattgcggaggtcgggtggttttcggagaattttgttttagtgttaaaaggaagttttttttgtagttttagggataggtgggatgggggagatagagttgtttagggatttagttatcgtttttaggtaggttaagttaggataagaggagtttcgaattttagaatttattaagtagttttttttttatagtttttaagttaattgtttttgtttaaatggtaagaaagtagttttgggggaagtttggatgaggttgtgtgaataaggattagtaaagaaagtatttcggttgtgttttattaaattatttaattggtaggagaaaaattagtttttatttagtgacgattatattttattttaatttaaatataggaatgttttgtgtaatataggaattgttaggtttgtaatttcgggtaataatgagtaggaaagaattttaattattgaaaattgaagttttgatagtatttatttgaatggttagttttttttggtttttgtggagatattggcgaatgatttagtttatttttgtgagacgagggggtagagattaagtaagggaggttatttttgagggtattttttaatgtttttgagtttttaatatgtcgtagtgaattgaatttaattttataatcgtgggtttatgagttgtttttatatttggttttatattaaaattatttagggtgtttgttaaaaatgtagatatttttatttttaatatatattgtaaatgagattagaaaaaataaggttagaatagttttttaaatatgtaaattaaaggatatatatgtgtttgtttaggtaaataattattcgtaaggatatataagaaattgataatagtagtagtttatggaaaggggaatttgatgttaggggaataggggtagaagagaaattttgttgtaaattgttttttatttttggatttgtgtattatatatatataatatttatttaaaatgagaaaattttaattatatggattttaaggttttataaatattaaattagaattttttggagttttggtttaaaaatttgtatttttaatgagtttattagttaatttttatgtagttaatttattatttgatagggatttgggtttagataattagttgttaaaatgattgaggtatatttgaaagtaaaatttataaagttattgaggaagttgttatttattaatagattatattagttaagtgttttttttttgttggtttttttttttgagacggagtttcgttttgttatttatgttggagtgtagtggtacgatttaggtttattgtaagtttcgtttttcgggtttacgttatttttttgttttagtttttcgagtagttgggattataggcgttcgttattatagtcggttaattttttgtatttttagtatagacggggttttattgtgttagttaggatggtttcgatttttttattttgtgattcgtttgttttggttttttaacgtgttgggattataggcgttagttattatgtttagtttatattagttaagttttaattaaattttttggaatggagttatttagttgtttgtttttttattatagtgaggaattagatattttttatattttacgtaaaatttttttttttatattgggtattttttattttattatttaataattattgggtagttgaaaggagttttaggagttattattttatttatttagtagatgtttattgagcgtttgttttatgttagttaacgtgttaaggtaaatgaggttgatataatgaataaagatgttttttgttattatggagttatttaatgggggagatattaaaaataaatatataaataattagttataaattgtataagtgttttttgtataggaagtatattgggtgttgtgatagaaaataataagagagattttttttttttttttagacgagttttgttttgttgtttaggttggagtgtagtggggtgattttagtttattgtaatttttgttttttaggtttaagtgatttttttgttttagtttttagagtagttgggattataggcgtatgttattatatttggttgatttttatatttttagtagagatagggttttattatgtttgttaggttggttttgaatttttgattttaagtgattcgttcgttttagttttttaaagtgttaggattataggtatgagttattgtatttagtgaagagatttattttaaataagggtattaagggtagtgattttgaaagtgggaatttaggatgaggaagaagtagttataggagggtagtaagggagtaatagtgttttaggtaggagaaagattaatttgttaaagttttgagataggaaagagtttggtttgatattggaattgaaagaaggtttttgtggagtgtagtgggtgaaggggaaagtgttgtaattgaagatggagtaatagatttgttttttttttatttttcgtttttttatatagatgtaaagttttggaatgttttagttaaatatgggaatattatttatttattgggtatattagattttgatttgaggaaattattttgtgtgttaatttatttttgttttttttattttttttttttatattgtttttatattttttgtaaaattaatgaagaaagaattagtaaagttagtagttattattttttagagttgaatatttaaggaaaataggtatggttttattgatttattttatttagataatataaattttgaagttgggtatgttttagtgttataagtagttatatattgattttttatttttaaatatatttgaatttttaaaaaattaatttgttttttgatttttatgatgaattttagaagtatattaatagttattatttattgagagtttattatgtgttagattttttttttttgagtattttgcgtgtattataatttttattataattttgtgagataagttttgttattgtttttatttttttgattgaagaatttgagaagtagagtgttaaggaatttgttttaggttttagagttattaggtggtagagttgggttatgaatataggtagtttgatttttagagttcgcgttttttgttattttgagatattatttttgtgtaatacgtttttttaaaattgaagtaaagtagatgtttttttgaagtttgtaaaggtattttttgttaaatgttttaagtttggatgagaaaaaaagttgggtttaatgtgtatgtgttatttataatttagatttatgattatgttttttagtttttattttttta

SEQ ID NO: 29 - DNA, 5666 bp, Artificial Sequence
  chemically treated genomic DNA (Homo sapiens)
gaggaattatgaatttaattttttgaataggtatagaataatttaagtagtgtattttattttggttgagttttggtagtttgtgatttttgaagaatttatttattttttataaattattaggtttatgaaggtaaagttggttttagtgtttttttttattatttttttaatggttgcgatgtttgttgtggtattttttattttattattgatattggtgtttgtattttttttttttttatttttattagttttgttagagatttgttgattttattgatttttttaagaataaatttttgttttattgattttttttattgtttttttatttttaattttattgatttttgttttaagttttattgtttttttttttttgttttttttgggtttagtttgttatttttgtatagttttttgaagtgataatttagaatattgatttgaagtttgtttttaattttaatatgggtataaattttttttttagtattgttttagttgtattttataaattttgatgtagagttattttttaattagtattggagatatattttgagaaatgtattattagataattagataatttttttattgtaaaaatagcgtagagtatatttttataaatttagatggtatatttaatatatttaggttgggttatatggtatattttattgtttttaggttataattttgtatagtatagtgttatgttgaatagcgtagttaattgtagtataatggtaagtattagtgtatttaaatatataaaaatattgaaaatgtaatttaaaatatagtattgtagttttataggattatagttgtatatgagttttgttattgatagaaatattattatatggtatacgattattttgtatttttatgtgttgtaagtgaagtgagttttttataaatagtatatagttgggttgtagttttttggttttttgtgtgttttgtgttttgtttgtttgtttgttttttgagatggagtttcgttttgttatttaggttggagtgtagtggcgcgagggaaagtgcgtgtttttttattgtatattgtatatttttgtatatgtaatatatacggtgtaatatgtaatatatacggtgtaatatgtaatatatattgtgtattgtaatatatattgtgtaatatataataatatatattgtgtaatatattatatattgtgtatatgtaatgtaatatgtaatatatattgtaatatatagttatgtaatatattgtgtattgttatgtaatatatattgtgtattgtaatatatattgtgtattgtaatatatattgtgtattgtaatatatattgtgtattgtatgttatgtaatatatattgtgtattgttaagtagtttggatatttatttttttttgtttattttttttttgttgttttttgtgttttatattattttattttatggtagttggttgtttaaagtaggtttattttaaaagaaatgatggtgttagtttttttttgtataattttgagatattagaaagtttttttaggtaatattttaagtggagattttggtgtttttgttttgtaaattattttagttttaggtttgagtgagtggaaagattaagtgttttatattttattggtaaagtataaatattgtattaaatgaaaataaaattttttaagtaagggtttttaaaaggtggtatttaatttgcgtgtatcgtatggggtaatgtaaaggttggaatatagtaaaataagaaaggaaagcgtataaaggtttagaggtggataggtatttgtttgatatatgttatgtgatagtagggaagttatttaatttttttgagttgttgtaatttagtagatttttaatattttggttttaggatttttttatatttttaaaaattattgaagattttaaagaaatgtgtatgtaggtatttagttattgatgtttattatattagaaattaaaattaatatatttagtttatttatttattaatttattttaaagtaataataattaatttattatattagtataaatgatatgtatatgaaatataattatatttttataaaataaaaaaaagtgtgaggagtggtataattttatatttttgttaatttttttattatttagtttaatagagatagttaaatttttaggtttgtttttgtatttaatttgaaatagaattatatgttatatagtatagtaaatattgttgaatatagggagaaaataagagaaagagataaatatagtttttaaattattatgaaaattgttttgatttagtagatttttgaataggttttgggtatttttaagtatttttgggaatatgttttgagaattatttattttatttaaaaagtggatttgaattttatttttttttgaagagttgtaggtagtttatattttagatggtatttggtgttttaattcgtggtcgttattatgtatagattaaatttttattagggtatttagattgggatggcggagatttaattgttaggttttatgaattttgattttttttttttagaattggaagaagatttagtaacgttgttgttttttttatttgattgagagatgaggagtttgtagttgtagtttggtattatataattgacgacgtgttttttagtgtttatgttgaggtattgttgcgtatggtgtgagggatggatagaatttatttttttgttcgtttattcgatcgaaatgggtgtatatttgtcggttttagcgagaacgttatttttcggagggagtacgcgaggatttcggtattatacgcgggtttacgtaggtagtgtggtagtttattatgttgttttttgtagtgttggcgagtttttcgggtggtagatttcggttttgtattatgaagtgtgttttgttgtgatgatgatgattgttggtgtattggttgtagtgattagtgagtgtgttggggttaggcgtttgaaggagtgtgttagcggtgggatattgtatgtttatagggtgttgtggttgggattttttaggtgatgttttaggttggcggggtgagttttcgtggggggtttttttttttaaaatgtggatataggagagagttattttgttttgtttgttggtataattttgaaagtgatttattaagtttggtttggtaaatattcgtatatgataatgaagattagaattttgttttatgttatagttttaaaataggtaaaaattgtaatttttgtattttgtatttttttattattattatattttaagttttagggtatatgtgtataacgtgtagatttgttatataggtatgtatgtgttatgttggtgtgttgtatttattaatttattatttatattaggtattttttttaacgttattttttttttaggtttttattttttaataggttttagtgtgtgatatttttttttttgtgtttatgtgtttttattgtttaatttttatttatgagtgagaatatgcggtgtttggttttttgtttttgtgatattttgttgagaatgatggtttttagttttatttatgtttttgtaaaggatatgaatttatttttttttatggttgtatagtattttatggtgtatatgtgttatattttttttatttagtttattattgatggatatttgggatggttttaagtttttgttattgtgaatagtgttataataaatatatgtgtgtatgtgtttttgaaaattatttgggtttggcgcggtggtttacgtttataattttagtattttgggaggtcgaggtgggtagattatttgaggttaggagttcgagattagtttggttaatatggcgaaatttcgtttttattaataatataaaaattagtcgggtatggtagtttgtgtttgtaattttaattatttgggaagttgaggtaggagaatttttcgaattcgggaggtggaggttgtagtgggttaagattacgttattgtattttagttagggcgatagagttagatttcgttttaaaattattattattattatttgtattattattattttgattttatgtgttaagttaaagataaggttttagtttatttgtaaaggatattaaaaataataattgttaatatagataatttttagtttttgaaaaattaaattagatataattgttgttttatttttttttttaaaattttttttttaaaaaaaattttaatgatattatttatgttaataagaattttatcggatgtaataaagttcgttttgaggtaaattgtagaattattatttaacgttagtgttttttaagtttttcgattttattaattagttagtaatatgtttaatttttttagaagttatttgaaataatttttagaattttaatttattaagatgttttaatattaaagtattagtatcgttatttgaggttggagggtttaaagttgttttattttaggtatatttaagataatattgtttaatttttataaacgattaattttatttggatattttaaaataatatttgaaataggtgttataaaatttttttaaaacgtgaatttttagaataattttttcgaatttggggtttgaagttttcgttttattaaaagtagattttattattattcggtagcgcggaggtatattcggagattgggatttttatttttttcggggcgtgatttgtgatttttgattcgtgattttattttttttagggcgtgattttttagttttatttttttcggggcgtggttcggagataattttggtaagagtcgcgtagttcgagtcgggcggaattattgttcgcgttgtcgtgttttcgggcggggatatttagggcgcgacgtttttttgttatttatagaggttcgtcgcggttgcgttattcgcggttatgaagtttcgggttaagatcgtggacggggtttgtttgaattattttatacgtgagtagggaggtcggagaggagcgagggaggaacggaaggaagtagtgagcgcgcggtggggatcgcgtaggaggattagaacggggatgggcgtcggaaggggtcgcgggaggatggggtcgggatgggggtgttggtgtaggtcgcgggagggtggggtcgggagggcgcggggcgggtcggagggtatttgtggggatgaaggcggtttttaagggacgtttttgaaatttgatttcgattacgtggttttaaaaaaaagcggttattgtttttatagacggttttattaggtattgatatatttttaaggttttattcgtttttttattttgatagtgtttaattttgtatttaattgtgtattgtagtatttagtagttaataaatttatgttgaatgaatgaatgattggtaggtgtttgtttttttatttgaatattgatgatgtgtgttgtatattttttttagtttgttgggagaattgcgtgatattaggggtattaaagtattttttagtgtgatattaacgttaagtggttatttttttatcgagaagttgatgaataagaaattttgtaaaataagttggtttttaggatatataatgtgtattttagtaattttttattttaatttttgttttagg

SEQ ID NO: 30 - DNA, 5666 bp, Artificial Sequence
  chemically treated genomic DNA (Homo sapiens)
tttaaagtaggggttaaaataaggaattattaaaatgtatattatgtattttagagattaatttattttgtagaattttttgtttattaatttttcggtggaaaaataattatttaacgttggtattatattggaaagtattttaatatttttgatgttacgtaatttttttaataaattaggggagatgtatagtatatattattagtgtttaaataagaaaataggtatttattagttatttatttatttaatatggatttattgattattaggtattgtaatatatagttaaatgtaaggttaggtattgttagggtggagggacgaatggggttttgaaggtatgttaatgtttgataaagtcgtttatgggagtagtggtcgtttttttttaaagttacgtgatcggaattaagttttagaaacgttttttgaaagtcgtttttatttttataagtgtttttcgattcgtttcgcgttttttcggttttattttttcgcggtttatattagtatttttatttcggttttattttttcgcggtttttttcggcgtttattttcgttttgatttttttgcgcggtttttatcgcgcgtttattgttttttttcgtttttttttcgttttttttcggtttttttgtttacgtgtgaagtggtttagataggtttcgtttacgattttggttcgaaattttatggtcgcggatggcgtagtcgcggcgggtttttgtgggtaatagaaaagcgtcgcgttttgagtgttttcgttcggaaatacggtagcgcgaatagtggtttcgttcggttcgggttacgcgatttttattagggttattttcgggttacgtttcggaggaggtggggttagggggttacgttttagaggaggtggggttacgggttaaggattataggttacgtttcgggggaggtgggggttttagttttcgggtatgttttcgcgttgtcgggtaatggtgggatttatttttagtgaggcggaggttttaagttttagattcggggaggttgttttgagaatttacgttttgaaagaattttgtgatatttattttaagtgttattttaaaatatttaaataaaattaatcgtttataaaggttaaataatattattttaaatatatttaaggtagagtagttttaaattttttagttttagatgacggtattggtattttggtattgaagtattttggtggattaaggttttgaaaattgttttaaatgatttttaaaaaaattgaatatattattggttagttggtaaagtcgggaagtttaaagaatattgacgttaagtgataattttgtagtttgttttaagacgaattttattatattcgataaaatttttattagtataaataatgttattaggattttttttaaaggaaaaattttaaagggggaaatgaagtaataattgtatttaatttggttttttaaagattaaagattatttgtgttaataattgttatttttaatgttttttgtaaatagattagaattttgtttttaatttgatatatagaattaagataatgataatgtagatgatgatgatgatgattttgagacggagtttggttttgtcgttttggttggagtgtaatggcgtgattttggtttattgtaatttttatttttcgggttcgagggatttttttgttttagttttttaagtagttgggattataggtataagttattatgttcggttaatttttgtattattagtagagacggggtttcgttatgttggttaggttggtttcgaatttttgattttaggtgatttgtttatttcggttttttaaagtgttgggattataggcgtgagttatcgcgttaggtttagataatttttaaagatatatgtatatatatgtttattgtggtattatttataatagtaaagatttggaattattttaaatgtttattaataatagattggataaggaaaatgtggtatatatatattatggaatattatgtagttataaaaaaggatgagtttatgttttttgtagggatatggatgaagttggaaattattatttttagtaaaatattataaggatagaaaattaaatatcgtatgtttttatttataagtgggagttgaataatgagaatatatggatatagggaggggaatattatatattggggtttgttggggggtggaggtttgggggagggatagcgttaggagaaatatttaatgtaaatgatgagttgatgggtgtagtatattaatatggtatatgtatatttatgtaataaatttgtacgttgtgtatatgtattttagaatttaaagtgtaataataataaaaaggtgtaaaatataaaaattgtagtttttgtttattttaagattataatatgaagtaaaattttaatttttattgttatatgcgagtgtttgttaaattaaatttaatagattatttttaaagttatgttaataggtagggtaggatggtttttttttgtatttatattttgggggaaaggattttttacgaaaatttatttcgttagtttgaaatattatttagaaggttttaattataatattttatagatatatagtattttatcgttaatatatttttttaaacgtttaattttaatatatttattaattattataattagtatattagtaattattattattataataaaatatattttatggtataaaatcgaggtttattattcgaaaaattcgttagtattataaaggataatatggtggattattatattgtttacgtaaattcgcgtataatgtcggagttttcgcgtatttttttcgagaaataacgttttcgttaaaatcgataagtatatatttatttcgatcgaataaacgagtaaaagagtgaattttatttattttttatattatacgtaataatattttagtatggatattgagaagtacgtcgttagttatgtggtgttaggttatagttgtaagttttttattttttagttaagtgggaaggataatagcgttgttaggtttttttttagttttgagaaaagggagttaaaatttatgaaatttgatagttgggttttcgttattttagtttaaatgttttggtgagagtttaatttgtatatgatggcgattacgagttaagatattaggtgttatttggagtgtgagttatttgtagttttttaagggaaaataggatttagatttattttttagataaaataggtggtttttagagtatgtttttaagggtgtttgggaatatttaagatttgtttaggagtttgttaggttagaataatttttataataatttaaaaattgtatttattttttttttttattttttttttatatttaatagtgtttattgtattatatgatatatgattttattttagattaaatgtagaagtagatttgagaatttaattgtttttattaagttggatagtgaaggaattggtaaaaatgtagaattatgttattttttatatttttttttgttttgtaaagatatagttatgttttatatatatgttatttatattaatataatgggttaattattgttattttaaaataaattaataagtaaataggttaaatatattagttttaatttttaatataataaatattaatagttaaatatttatatatatatttttttgaagtttttagtgatttttaagagtgtaaaggggttttgaaattaaaatgttggaggtttgttgagttatagtaatttagagaggttaagtgatttttttgttattatatagtatgtgttagatagatgtttgtttatttttggatttttatgcgttttttttttttgttttattgtgttttagtttttgtattattttatacgatatacgtaaattggatgttattttttgaaaatttttatttaaagaattttatttttatttggtgtagtatttgtgttttgttagtggagtataaaatatttaatttttttatttatttagatttggggttgaagtagtttataggataaggatattaagatttttatttaggatgttatttagaaaggttttttgatattttaaggttgtgtaagggaaagttaatattattattttttttgagatagatttgttttgggtagttaattgttatggggtgaggtggtgtgggatatagaaggtaataggggagaaataagtagaaaagaataaatgtttaaattgtttggtaatgtatagtgtatattatatagtatataatgtatagtgtatattataatgtatagtgtatattatagtgtatagtgtatattatagtgtatagtgtatattatatagtaatgtatagtatattatatagttgtatattatagtgtatattatatattatattatatatatatagtgtataatatattatatagtgtatattattgtatattatatagtgtatattataatgtatagtgtatattatatattatatcgtgtatattatatattatatcgtgtatattatatgtgtaaaggtgtgtaatgtgtagtagaaagatacgtattttttttcgcgttattgtattttagtttgggtgatagagcgagattttattttaaaaaataaataaataaataaaatataaaatatataaaaaattagaaaattataatttaattatatgttgtttataagaaatttattttatttataatatatgaaaatataaaatggtcgtgtattatgtaataatatttttgttaatgatagagtttatatataattgtggttttataagattataatattgtattttaaattatatttttagtgtttttgtatgtttagatatattaatatttattattgtgttataattgattgcgttatttagtatagtattatgttgtataggattgtagtttaggaataataggatatattatataatttagtttagatatgttaggtatattatttaggtttgtagaagtatgttttacgttgtttttataatgaggaaattgtttaattgtttaatggtgtattttttagaatgtatttttagtgttaattgaggaataattttatattaaaatttgtgggatgtagttaaagtaatgttgagaggaaaatttatgtttatattagaattgaagataggttttaaattaatattttaggttgttattttaaaaaattatataaaagtagtaaattaagtttagagaaggtagaagaaaggaaataataaagtttagagtagaaattaataaagttgaaaatagaaaaataatagaggaaattaatgaaataaaagtttgtttttgaaaaaattaataaaattaataaatttttagtaagattgataagaataaaaagaaagaagatataaatattaatattaataatgaaatagggaatattataatagatatcgtagttattaaaaagatggtagaaaaaaatattaggattaattttatttttataaatttagtgatttataagaaataaatgaattttttaaaagttataaattattaaaatttaattaagatgaaatatattgtttgaattgttttatatttatttaaaaaattgaatttataatttttt

SEQ ID NO: 31 - DNA, 8093 bp, Artificial Sequence
  chemically treated genomic DNA (Homo sapiens)
ttatggaaggaaatgagattagttagcgagttgatatagaataaggtagtttaaaataaatttttttaaaaatacgaagaatagatattgaagggaagaggtgtttgtaaagattaagaaagtatatttggagatggtatttttttaaagttaaagttattaagtgtttaagtgttttaaggagggtaagattattaataaggatttagtatagtagagtaatttgagtggtaatacgggatattgggaatataaatttgttaagaaaattagtaggaatgagttataggatagtaattggtaaggatttaataattttttttttaatgtacgtattttaattatatttattgttataataggattagtaataattatatttatttaaaaaaaaaaagattgttatgtagttatagaattatttaatatagaaaatagtaaaatatatttttttttttttttttttttttttttttttttataaataagattagtttatagtaaattttttatagttaagggttaatttaaaatttttggtttatattttttttttatttaatgattatatgatgtaaattaattttattaatattttaagtaaaatatattggaattttataaaatgtataagattttaatatttaaggaattggggttagaaagtagaagtggtttttaggttttttagttttttttttaagtaataaagttttgttgtgaatatttaaagttattgggaaattatcggtagatttttttgtttttttttttcggttttttattatgttgtttttttagatatgtaagtttattttattaattaaaattttagtttgattatttttgataagtatttaatcgatatgtaattttttttttgttttaaatatgtataataggatagagtttttaaatttgatttaattattaatttttgatttataagtgttatggtgagttaatagaatttattaatgtttttattgtattttattagttaaatttagaaggttggaattagttttttttatttagtattttgttagtttgtttagtttgtatttttaattttgtttttaatggtaatttgttttattttttgaaataaaataatttatattttgggagggttaattttttattgtgttaggttgttttatgtattgtaggggtgagtgtttttaggtttaaatgttaatagaagtttttagtaaatatgataattaaaaaagtgtttttatatattttttagtattttttggaatgataggttattgtttttagttgaaagttattggtataattttggtttttaagtttttatgttatttattttaattgtttagatattaattttatttaaatttttagttatagtttggttttttgaatttgttggattagtaattatagattaaggtgttttaatagttaagataggattttggaataagagtttttaaattgtataatatttgagaggatttatgaatataaattgggttttgtttataattagttttatataatgaattttaagattgtttttttatggtgaatagaagtttggaaattattgttttggtataaagtagattattttagtagaaatatagaattattgtaatttgtgaataagattgtttttaaatatttttatttgtgtgttattttatatatagaatgtgtacgatagttttaaattttagaataaatttatttttagtatttaataaaatttgatattgtattattttaaaataaagtgtttattttaggtaggattttttaaaataaagtagtaatatttacgtagataagataaaaaagttaaaatattttatattttttaattttggagtgtaattttttttttttatcgtttttgatagggttaaatttgtgtttatagtaaaaaaaaaaaaaaaaagaattattaattggtaattattaagattttatatttattatagttttttaataggtaagttgataaaatagtttttagttattaaaaaaaaaatttaaggaaaatttttaataattagttttatttttaaattgtatgaagttttttatatttgaaatttaaaaatgattttaatgattttttttattagtaatgtgttattattgaggtgggtgatggggagggaagagggaagaaatttgttagtattattttcgaatttagaaatgtttaaaaaaaagttttaaatattttgatggttagataaaatatttttattgttatgtatgggttttttttttggaaatttatgaatttgttatgtgagtttttgtaaattggtttaaaagtatatttaaggagttgataatttaagattatatgaattagaattttaatattttattaaaataagagttgaaatttttggtatttatttttagaatatttaaaaaatagattgtaaatttaatttatattaatattaaatttttttaaaattaattatattataaaagataatgattttgttattaaattaagttttaaaaaaggtggtatttttatgttttagttttatgttgttatttgagatgaaaaaaaaggtaattgttagaattttaattgtgattagtttggacggttggtatttggtatttttttataatttaaattagtaaatttgaaaatttaaattaatttttgtttttagaattaaatttttgttgagttttttaattttgtattataaagttttatggattagatttattttttttttttataaggttattttaatcgggttttattttagttgtggtaattcgaaatagggtttggagatgtttatttgttaatggttgatttaaagtgtgttggtttcgagttaaatatgaaaaagtttttttatagatttggttattattaaataaggatgttattttataggtaatttttttgataattgggtaggatttagtagataatttagtataaaattgttttaagtttttgattttgtatttattttaaagattagtgtttgtttgaagttttgttagttttatttttattgaaataggtgtatatttaggtttaaagttaaatggatttgaaaaaagttttaagttttttttaatgaatttgaggtttttaaaatgttttttaaattttttttggagacgatagattattatttgatatttattaggattaaatatttttttattttttttattttgttgttttagtttattaataatttttttgagggtaggaaagtttgttagatttttttttttaatatgtttttgaaataaatttagtttaatttcgaaagtataaatatggttaaaggtagtagtagtaaagattttattaattcgtaattttttattgagttttcgaaggtgttttataatgtttattaagaagttaaagttataaagttattgtttgtttgagaagtggattgttgttgtttttattgaaattaagaacgtttttatttttttttttagagagaatattagttttaaagtttttttttttttaagttaattgtttagatatcgtttattaatttttttattatgttttgatttagatttcgttagtaaagtttgaaatttaggtcgtttaacgtttttggttttaattaaaattatttattcggatatggtatttatgatttgattaatatttatattataggagtttaatagttttaagtgaagaaattttgaataatgaatgatattttaatagttggggtttacggtttttttttttatgtatgagacgagttttgagtttttattaattatttttaaagtatgggtcgtggttagtttaattattttttgtaagttaagttttgttgtttgtagggattttaggattgtcgatatgagcgtattaatattgaaatgatgagttaggttgattatggttagaagatttttttgtatttttaatttagggtttatatcgcggataaagattaggaggtagtttttataggttataaaagtttggtcgtttaaggtaagagaataggttttaaagtttttggttcggttaaaaagttggttgcgtagatttttgttaatgtttaggattttttgttttgtgatatttggagataagttaacgttttgtaggacgtttatatgttcgggtagtattttttttagtaatatttttatgtattggtatataaagttttttttattttagtcgcgattttttaaggttaagaggcggtagagttcgaggtttgtacgagtagttttttttttaggagtgaaggaggttacgggtaagtcgttttgacgtagacgttttattagggtcgcgcgttcgtcgttcgttatatatcgttcgtagtattcgtgtttagtttcgtagtggcgtttgacgtcgcgttcgcgggtagttacgatgaggcggcgatagattaggtatagggttttatcgtttttcggaggttttattattaaataacgttgggtttattcgggtcggaaaattagagtttcgtcgatttttattttgttttttttgggcgttatttatattttgcgggaggttataagagtagggttaacgttagaaaggtcgtaaggggagaggaggagtttgagaagcgttaagtatttttttcgttttgcgttagattattttagtagaggtatataagttcggtttcggtatttttgtttttattggttggatatttcgtatttttcgagtttttaaaaacgaattaataggaagagcggatagcgatttttaacgcgtaagcgtatatttttttaggtagcgggtagtagtcgttttagggagggacgaagagatttagtaatttatagagttgagaaatttgattggtatttaagttgtttaattaatagttgtcgttgaagggtggggttggatggcgtaagttatagttgaaggaagaacgtgagtacgaggtattgaggtgattggttgaaggtattttcgttgagtatttagacgtttttttggtttttttggcgttaaaatgtcgttcgtggtaggggttattcggcggttggacgagatagtggtgaatcgtatcgcggcgggggaagttatttagcggttagttaatgttattaaagagatgattgagaattggtacggagggagtcgagtcgggtttatttaagggttacgatttaacgggtcgcgttatttaatggcgcggatacgtttttttgttcgggtagaggtatgtatagcgtatgtttataacggcggaggtcgtcgggttttttgacgtgttagttaggtttttttttttttcgtagatcgtgtgtttttttatcgttttttttcgagattttttaagggttgtttggagtgtaagtggaggaatatacgtagtgttgttttaatggtatcgttaattaagtaaggaagttatttaatttaaaattatgtatgtagaatatgcgaagttaaaagatgtataaaagtttaagatggggagaaaaatttttttttagagggtattgtgttattgtttttttgttttttatttattttagaaattatttgtttatatttaaaggtataatttattttgagttttttttaaaataaatcgtttgtagttttaggataggttgatgtattttgggtttgatttttgattattttattgttaaattagtgattttttttagtgtttttttgttttttatttcggaggacgtatttcgaagatattagattttatgggttatttttggattttgaagtttataattgtgataaaaaatgtgaagggaagagatttgaaatatgtggaaggaaaagtgagtgtagattataaatttttaaaaagataagtttaaaatatatttaaacgttatgttagattattttgttaaaattagttgttagtgacgttcgtacgttaatagaaaaaagaatgttttagtttggagtggtaggtttttagagggatttattgtgaaagtataaattatttagggtaatgggattgagagaatagtgggtagaaaggattattgaaggaaaggaagagaattggaaggtagatgaaagaaggagtaagaatttggggatgtttttttttttttatttgtaatagtagtaatagaagtaatggtagattggtttttgtttttattgtgttagaatgaattgataggataattgggtttattattgtattgtgttagaatattgtaaaataaaattaaatatattagtttggtggtttgtaattaattatttaagtggagatttttattttttttttattttttttttagacggagttttattttgttatttaggttggagtgtagtggcgcgattttagttgattgtaattttttttttataggtttaagggagatttttttgttttagtttttcgagtagttaggattataggtatgtgttattatatttggttaattttgtatttttagtagagatgggatttttttatgttggttaggttggtgttaaaattttcgattttaggtgaatcgtttgttttagttttttaaagtgttgggattataggcgtgagttatcgcgttttgtagttttttgtatttttaatagagatagggttttattatgttagttaggatggtttcgattttttgattttaggtgatttgttcgttttggttttttaaagtgttgggattataagtatgagttatcgcgttcggtttaagtggagatttttatatggagtttagttatattttttttaatatataagttgagatgattaatataattttaatataggggtttatgagaaatgtttgtaatatttaagtaatttattgtttttttttttttttttttaagatgaagttttattttgttgtttaggcggaagtgtagtggcgtgattttggtttagggtaatttttgttttttggttttaagcgatttttttgttttagtttttcgagtagttgggagtataggcgtgtatgattatattcggttaatttttttatttttagtagagacggggtttttttatgttggtcgggttggttttgaatttttgattttaggtgattcgtttattttagtttttttaagtgttgggattataggtgtgagttttcgtgtttagtttattattttatttttgaataaagaattgtttgtgtggggaatagataatttttttttatgtagtttttgttagaaaatttgttttttttagtagttggtttgtgtttataggttattttttgaaagtataaaaaatttattgattttttttttttgggtttttttttttttttgagatagagttttgtttttgttgtttaggttggagtgtaatggcgcgattttagtttatcgtaatttttattttttgggtttaagtgatttttttgttttagttttttgagtagttgggattataggtatgcgttattatgtttggttaattttgtatttttagtataaatggggtttttttatgttggttaggttggttttaaatttttgattttaggtgatttattcgttttggttttttaaagtgttgggattatgggtgtgagttattgcgtttggttagaaaatttattgattttttaaagatttattaattttttgtattattttttttttttttttttatcgtaaatataaaagggaatagtagagaaaattatttagaattttattttttagtgatattatttagtgatattttattagagttatttaggaatttgaggttgaataaagtttaggtaaaagtaaaattagttgagaagagatatttgttaaaagaaatttatttttaattttatttgttgttttttttagaggaatagaaatagtgttgaatgttttattagaaatgatggttgttttgttcgtttttttttttttttttatataatatgtaaatttatatagtgtatgagtttgtaagataaaggaaaaatacgttaatgaggtattattgtttgtatttggagtttgttattattgtttggtttatattaaaatatgtatattagagtagttgtagattgataaattattttttgtttgatttgttagt

SEQ ID NO: 32 - DNA, 8093 bp, Artificial Sequence
  chemically treated genomic DNA (Homo sapiens)
attggtaaattaaatagaaaataatttattagtttgtaattattttaatgtatatattttaatatgagttaagtaatgataataaattttaaatataaataatagtgttttattaacgtgttttttttttgttttataggtttatatattgtatgagtttatatattgtgtgagagagagggaagagacgggtagagtaattattatttttaataggatatttagtattatttttgtttttttaggaaagatagtaagtgaagttaaaaatagattttttttggtagatgtttttttttaattaattttatttttatttgaattttatttagttttaggtttttaagtgattttaataaaatgttattaaataatgttattaaaaaataaaattttgaatgattttttttattatttttttttatatttacgatggaggggaaaaaaaaaagtaatgtagaaagttaataaatttttaggaagttaatgaattttttggttaggcgtaatggtttatatttataattttagtattttgggaggttaaggcgggtggattatttgaggttaggagtttgagattagtttgattaatatggagaaattttatttgtattaaaaatataaaattagttaggtatggtgacgtatgtttgtaattttagttatttaggaggttaaggtaggagaattatttgaatttaggaggtggaggttgcggtgagttgagatcgcgttattgtattttaatttgggtaataagggtaaaattttgttttaaaaaaaaaaaaaaatttaaaaaaaagaagttaataaattttttgtgtttttaaagagtagtttataagtatagattaattgttagagaaaataaattttttagtaggggttgtatgagaaagagttatttattttttatatagataattttttatttagaaataagataataggttgggtacgggggtttatatttgtaattttaatatttggggaggttgaggtgggcggattatttgaggttaggagtttaagattagttcggttaatatggagaaatttcgtttttattaaaaataaaaaaattagtcgggtgtggttatgtacgtttgtatttttagttattcgggaggttgaggtaggaagatcgtttgaaattaggaggtagaggttgttttgagttaagattacgttattgtattttcgtttgggtaatagagtaagattttattttaaaaaaaaaagaaagaagataataagttatttaaatattatagatattttttatgagtttttgtattgaagttgtattagttattttaatttatatattaaaaagagtataattggattttatataaaaatttttatttgagtcgggcgcggtggtttatgtttgtaattttagtattttgggaggttaaagcgggtagattatttgaggttaggaaatcgagattattttggttaatatggtgaaattttgtttttattaaaaatataaaaaattgtagggcgcggtggtttacgtttgtaattttagtattttggaaggttgaggtaggcggtttatttgagatcgagagttttgatattagtttgattaatatggagaaattttatttttattaaaaatataaaattagttaggtgtggtggtatatgtttatagttttagttattcgggaggttgaggtaggagaattttttttgaatttgtgaggaggaggttgtagttagttgagatcgcgttattgtattttagtttgggtgataaagtgagatttcgtttaaaaaaaaaataaaaaaaaaataaaaatttttatttaagtaattaattataagttattaagttagtatgtttagttttgttttatagtattttggtatagtataataataggtttagttgttttgttaatttattttaatatagtagaaataaaagttagtttgttattgtttttgttattattattataagtgaaaaggaaaaaatatttttaggtttttgtttttttttttatttattttttaatttttttttttttttttagtggttttttttatttattgtttttttagttttattgttttgaatagtttatatttttataataaatttttttagaaatttattattttaaattgaagtatttttttttttattaacgtacggacgttattaataattgattttaataaaataatttgatataacgtttaggtgtattttgggtttgtttttttggaagtttatagtttgtatttatttttttttttatatgttttaaattttttttttttatattttttgttatagttataagttttaaaatttaaggatgatttataaaatttggtattttcgaagtgcgtttttcgaaataaaggataggaaaatattaagaggggttattaatttaataatagggtaattagaagttaagtttaaagtgtattagtttgttttaaaattataaacgatttgttttgaaagaaatttaaaatgaattgtgtttttggatgtgaatagatgatttttggaatgaatgaaaagtaagaaaatagtaatatagtattttttgaaaaaaggtttttttttttattttaagtttttatatattttttaatttcgtatgttttgtatatataattttaaattaagtggtttttttatttagttaacggtattattaagataatattacgtatatttttttatttatattttaaataatttttaaaaggtttcgggggagagcggtaaagaaatatacggtttgcggaaaaggagaaggtttgattggtacgttagggaattcggcggttttcgtcgttgtgggtatgcgttgtatatgtttttgttcgggtaaagaggcgtgttcgcgttattgagtgacgcggttcgttaagtcgtagtttttaagtgagttcggttcgatttttttcgtattagtttttaattatttttttgatagtattagttggtcgttggataatttttttcgtcgcgatgcggtttattattgtttcgtttagtcgtcgaataatttttgttacgaacgatattttggcgttagaagagttaaggaaacgtttagatgtttaacggaagtgtttttagttaattattttagtgtttcgtgtttacgttttttttttagttgtagtttacgttatttagttttattttttagcggtagttattgattggatagtttgaatgttagttaaattttttaattttgtgggttgttgggttttttcgtttttttttgaagcggttattgttcgttatttagaaggatatgcgtttgcgcgttagagatcgttgttcgttttttttattggttcgtttttaggagttcggggaatacgaaatatttagttaataggagtagagatgtcggaatcgggtttgtgtgtttttgttgaggtgatttggcgtagagcggaggaggtgtttggcgttttttaggttttttttttttttttgcggtttttttaacgttggttttgtttttgtggtttttcgtagaatgtggatgacgtttaaaagaagtaagatggaagtcgacgaggttttagtttttcggttcgagtggatttagcgttatttggtggtggagttttcggagggcgatggggttttgtgtttggtttgtcgtcgttttatcgtagttattcgcgaacgcgacgttaggcgttattacgaggttgagtacgaatattacgagcggtatgtggcggacggcgagcgcgcggttttggtggagcgtttgcgttagggcgatttgttcgtggttttttttatttttgaagagagagttgttcgtgtaggtttcgggttttgtcgttttttggttttgaagggtcgcggttggggtgagggggattttgtatattagtgtatggaggtgttgttgagagaggtattgttcgagtatgtaagcgttttgtaaggcgttgatttatttttagatattataaggtagaggattttgagtattgataggaatttacgtaattagttttttaatcgagttagggattttaaagtttatttttttgttttggacgattaggtttttgtggtttatgagaattattttttggtttttattcgcggtgtaggttttgagttggaggtgtaagaagattttttgattataattaatttgatttattattttagtgttggtgcgtttatgtcggtaattttagagtttttgtagatagtagggtttagtttgtagagaatggttggattgattacgatttatattttgaggatgattggtgagaatttaggattcgttttatatatgagagaaaaggtcgtaagttttaattgttggaatgttatttattatttaggatttttttatttggaattgttgagtttttatgatgtagatgttaattagattataaatattatattcgaatggatagttttgattaagattagaggcgttaggcgatttgaattttagattttattaacggaatttgaattagagtatggtgaaagggttaatggacgatgtttgaataattggtttaggagagggaaaattttaaaattaatattttttttaagaaaagaaatggaagcgtttttggttttagtaggggtaataatagtttattttttagataaataatggttttgtgattttggttttttggtggatattatggaatattttcgagaatttagtgaagaattacgagttagtaaagtttttgttgttgttgtttttgattatatttgtattttcgaagttaagttgaatttattttaaagatatattgaggaaaaaaatttaatagatttttttgtttttagagaagttgttgatgagttaaaatagtaaaataaggaagatgaaaaaatatttgattttgataggtattaaatggtgatttgtcgtttttaaaaagaatttgagagatattttaaggattttaggtttattaaaaaggatttagaattttttttaaatttatttaattttaaatttgaatatgtatttattttagtgagggtggagttaataaaattttaggtaaatattaatttttggaatgaatatagaattaaagatttggggtagttttatgttggattgtttgttgaattttatttaattattaaaggggttgtttgtaaggtggtatttttgtttgatagtaattaaatttgtgaaaaggtttttttatatttgattcgaaattaatatattttgagttagttattaatagatgagtatttttaagttttgtttcgggttgttataattgaaatggagttcggttgggatgattttgtgagagaaagaaatgaatttaatttataaggttttgtagtataagattgaaaaatttaataagaatttaattttaaaagtaaaaattggtttgagtttttaagtttattaatttggattgtgagaaagtattaagtattagtcgtttaaattgattataattaaaattttgatagttgtttttttttttattttaaatggtagtatgggattgaaatatgagaatgttattttttttaaaatttagtttagtgataaagttattgttttttatgatatagttaattttaaagagatttagtattaatgtgagttgaatttgtagtttgttttttaggtgttttgaagataaatgttaaaaattttagtttttattttaatggagtgttaaaattttgatttatatagttttaaattattaattttttaaatgtgtttttgaattaatttgtagaagtttatatagtaagtttataagtttttaaaaaggaagtttatatataatagtggaggtgttttgtttaattattaaaatgtttgagatttttttttaaatatttttgagttcgaaggtaatattgatagatttttttttttttttttttttattatttattttagtgataatatattattgatagaggaagttattagaattatttttaagttttagatataggagattttatgtaatttggagataagattaattattgggggttttttttggattttttttttaataattgggggttattttattagtttgtttattaaaggattatggtaagtatagaattttaatggttgttagttagtaattttttttttttttttttttattgtagatataagtttggttttattaaaaacgatgaggaaaaaagattgtattttaggattaggaggtgtgagatattttagtttttttgttttatttgcgtgggtattgttgttttattttaaaaaattttgtttaaagtaaatattttgttttaaaatgatatagtattagattttgttagatgttagaaatggatttattttaaaatttggaattgtcgtatatattttatatgtaagatagtatataagtagaaatatttaaaagtagttttatttatagattgtagtaattttgtatttttattaagataatttgttttgtgttaaaatagtaatttttaaatttttgtttattatgaaaaggtaattttaaagtttattatgtaaaattaattataaataggatttaatttatatttatagatttttttaagtattatataatttaaaaatttttgttttaaagttttgttttaattattgaaatattttaatttgtggttattaatttagtaaatttaaggaattaggttatgattaagaatttaggtggaattgatgtttgggtaattaaaataaatggtataagagtttaaaaattaaagttgtgttagtggtttttaattagaggtagtaatttgttattttagaggatgttgagaaatgtgtaggggtatttttttggttgttatatttattaggggtttttgttggtatttaagtttaaagatatttatttttgtagtgtatgggatagtttggtataatgaagaattagtttttttaaaatgtagattattttattttaagggatagggtagattattattagaagtaaaattaaaagtataagttgggtaaattgatagaatattagataggagagattaattttaattttttaaatttggttagtaaagtgtaataaaggtattgataagttttgttagtttattatagtatttgtaaattaggaattaataattgaattagatttaagggttttgttttgttatatatatttaaggtagaaaaaaagttatatgtcgattaggtatttattaagaatggttaagttgagattttggttaatagagtaagtttatatatttagagaaataatatagtggaaaatcgaaaaaaaaaaatagaaaaatttatcggtaattttttaatagttttgaatatttatagtagagttttattatttgagagaaagattggaagatttgaaagttatttttgttttttaattttagttttttaaatattgaaattttgtatattttgtgaaattttagtatgttttgtttaaggtgttaataaaattagtttgtattatgtagttattgagtgagggggagatataagttaaggattttaaattgatttttagttatagagaatttgttataagttagttttgtttgtaaaaaaaaaaaaaaaaaaagaaaaagaaaaaagtgtattttattgttttttgtattaagtaattttgtaattgtatggtagtttttttttttttaaataaatatagttgttattggttttgttgtagtagtgaatatagttaaaatacgtatattaaaaaaaaaattattaggtttttattagttattgttttatagtttatttttattagtttttttgatagatttgtatttttagtgtttcgtattgttatttaaattgttttattatgttaagtttttgttaatagttttattttttttgaaatatttgaatatttgatgattttagttttgaggagatattatttttaggtgtgtttttttagtttttgtaggtattttttttttttaatatttgtttttcgtatttttaaaaaaatttgttttagattgttttgttttgtgttagttcgttagttgattttatttttttttatgg

SEQ ID NO: 33 - DNA, 5455 bp, Artificial Sequence
  chemically treated genomic DNA (Homo sapiens)
tttgcggtatagttttatttacgagtaaaaatagtttcggaggcgaatgtgagagtgaggtggggattatatttaagggggcggatttaagtaggtttcgatttttttgggtttagggagagggaatggttgttcgagaaatttaagtagaagggagagggagatataggtagagatatataaagatgagagaaataaaaggggggaaggggaaagaaaggcggtaggaaagtggagagtggggagacgtgcgtgttaacggagagatataaacggagcggggagaagaggatattgttaaggaagggagggaggggtatagttaggaggttttaagattgggaaatgaatgtagtagcggtagggaggggagcggtcgttgtaattagaggggggttgggtgatatcgagaagtttgttgtttgtagttttgttatttaaatgttataggattatttttttttatttatattcgtagagagaggagagagttggggtaagttttttatttttttaatttttaaattttaaaatgttttaatcgagtttttttttttcgtttgattttttttttatttatttttgtggtagttacgttaaatttacgtttttttgttatttttttttttgtttttttttttagttttggggatatttaatgttattcgattatttttttagttttgttttttaaatttcgattttagttttttgttttgtttcgtttttttaaagttttttaatttatttgtttttatttttaggttttttttaatatatcgttttttttgaagcgtttttatttatatatatatatatatatatatatatatatatatatatatattttttttattgtattatttatttttagattttgtagggatatatgttttaattgaggtttttttttgttttttttaaattttgttgggtttttattgtttttttattagttcgttttttaattttattttagttttatttttgggaatttttttttttttttatttttttttttttagtttgttagaaatttgtatttttataaattttttagggttgattttagaatttttattatttgttaataagttaatgttttttttttttaaaattattttttaattaaagagtgtacgtgggattgggggtgggagttaaggagggaagggattggggagttaaggttggatcgggggaaaggtgagagttggtttttaggaatttgggtggttgaggagagaagtgtttttatttttacgaataattcgatttgcggttgttttttagttatggttgcgtcggggattaggaagtggtcgtttttgggggaattgggaggggttgggatcggggaaggcgggttttatatttagggatttttttttttagatttagggttgtttttttagtataatataagtttaattagatttatttgtatttaaattaggtttttttattagtttaacgtattttatatttagtttttttagttcggttttttttcgggttggattagagagtcgttgatttatcgatcggtttcgttttgaatttggggaggggattggaggggggcgggattcgacgatgtagggagtgagttcggaaggggaattttcggattttttataggatggggatgggggtgttaaggaggagttttgaaaatttttttgttttttcgattttttttgaatataggatttttttttgttttagtttttttgttttattaatttgagtataattcgattgatttttatataaaaaatttgatattaatagtttgggtatattcgtgaagatttagggatggggattttaaatggaaaggtggtcgtttaattattttgtattttttttagattttaatttaaattttgggttgttgggattgtggtttgagagaagaattcggaagtggaaggttgggattgtagataggaatcgttagttatgtagtttgggattagggaaggggtgacgttagtattttttgagttgtttagattggtgttttagtaggttttgtgtttttcgtagtttattgttttcgggtttagtttagtattaggatttgtagtttttgtggtttatatttgggattgggtataggaaatagagttaggggtcgggtgaggtggtttacgtttgtaattttaatattttaggaggttaaggggggtggattatttgaggttagggagttaagattagattggttaatatggtgaaattttgtttttattaaaaatataaaaatttgttaggcggggtggtgggtatttgtaattttagttatttgggaggttgaggtaggagaattaattgaattcgggaggtgaaggttgtagtgagttgagatggtgttattgtattttagtttgggtaataagagcgaaattttattttaaaaaaaaaaaaaaaaagaagaagaagaaaagaaaaagaaagtagagttagggatgggaagggagatgacgaagttttttgcgaaggaaatataaagtcgaggtaaggggttttgttgtagggaggggtttgtttttgtagtttggttagttttgtgtttttatttatgttttttattggggtttttttttgtgttttttgttttcgttttattgataggttgttttggagatggggtagaggggtgggattattatggttcgattttgaagtatgtgtatagggggtggggtaggggtgttgttagttggttttgttatggggataaagaaagattagatagaatagtgggagtagagtttttggggatatttaaataaataagtagggaggatataggaggagtagttttttttttagtaattttgatttttattaaatttttatgatttgttgaaaaaataaatttagaattttagtttttatattttgaattttttttttgtttaattattttttttttattttttttattattttttgtttaataaaagatttatagttttagaaaattatggtggagtgtaagaatatagaattaaaatagagtttgaaatttaaagaaagggagagatttgggggaggagtggggtggagtgacgtgatgtgttgttggaaattagtagttggtggtttttttttgtgtttttttttttgtgggtttttttttgtttgtgggagggttttttttttttttttcgatagaaaggttatttttggtgttcgtttttttgaattgtaatattttgtaagggtatgattttatgtttttgtgtgggtgtgaatttttttatggtgatttttaaaatttgtatataggatttttttttattgaggggaggggattaaaataattttattttttagggtttttttttgttttaattggtttgtgtttaagagaagttttaggtaaatggggttagtttgaagattaaataggtttggtagtttttttcggtttttttttttttttttatagttttatagttatagttgttttgatattaatattgattttggttggttggtatgattatttatagggtatcgtgttttaatttattaggtgataggtaacgttgtttttttttggaattatttagtagagttagggttgtatttttaaattttgtaatagaggtttttttttattttatttttttgtttttgtattttttttattttagtagtttttttttttttttttgggtttttttttttatttttttttttttttgggtttggtaaattagtttttaatttttttatattttagattggaaggtgggtttttttttgatattttttagagttgttattaattttttttaagtttttatagttttattgtttaatagatttgttaggggtaattattaatttagtttttaattttgtttttttattttttttgttggaggggattttttaattattggttagtatagttaggttattttatttttattattttttttaattttttgggttggggggttggggaggaatttttttattttagggtattaggaataaagttggggaggatggtgtatttaaagggattatatatatatatatatatatttttttttttttttttttataattttattttcgtaatatatatatatatatatatatatatatatatatatatatatatagacgtataaataagttttatggagtagtgattttattatgtttatcgttttgagtttaatttttggtttaaaataggtattaaatagttgtcgaatgtatgaatgatagatatttttttgtttttaggggtgtgtagaagtgcgaaggggtatgggtatgttttagtaggggtgtgagtgttttgattagaattatttttttttgttagaatttgatgtaattcgaatgtttttatttttgtttgaagggtttaaataataaattaggttttgtcgtgttattatgggggtggttatattttgtatttaggaaataggtacggtagggttgagatagaagttttgtttgttttcgtttatttatttgaaatatcgtttatttaggttttattttgtttgttaggtattgttttaagttttgtataaatattaatttagagggtataaatattaatttaagagttgttgtaggaaaaaaaataagcgtttttggttttttaagtttggttttttttttaaaattttcgtaacggttttaaattttttttagggattgggattacggattttggttcgattttttcgcgggttttttattgcgttaattaaattttagaaatagtgagtgttagaggttcggttgttaagtaacggtagagggcgggaagtttgaacgttttggattcgtttcgaaggtaaataggttaattagcgtttagattttttagttacggtagttcgtttttttttttcgttttgtcggatttttaggttggattcgggtttttttaattaatagcggttaggagggcggggcgcgtgcgcgcgtatttcgtttacgcgtcggcgcgttttttttgtaggttcgtggcggtcggttagcggggcgtttttttatttgtagcgatttaggttattgaaaaggcgggaaaacgttgcgatggcggtagttgggggaggaggaagataagcgcgtgaggttggggttttggcgcgtggttggtagaggtagagatataagacgtgtacgattcgttttatagggtttttagattttttttttttaaagggtaattttcgcgtgataggaatgagggtggggcgcgtggagttttttataatttgtattttagttaaatattcgagaatttattttttgtgtttatagttttttacgttttttagttttgtttcgtagttttgtagtagaagtatttagtgttttgtattttgcgcgttattttatttcggttttttttgtgaatcgttgttttcgaatcgtttttattttttgtattcgtaga

SEQ ID NO: 34 - DNA, 5455 bp, Artificial Sequence
  chemically treated genomic DNA (Homo sapiens)
tttgcggatgtaaaaagtgagggcggttcggaagtaacgatttatagaggaggtcggggtagggtggcgcgtagaatgtaaagtattaagtatttttgttatagggttgcggggtagggttgaggggcgtggagagttgtggatataggaggtgaattttcgggtatttaattaaagtatagattgtgggaaattttacgcgttttatttttatttttgttacgcggaggttattttttggaaggaaggggtttgagggttttgtggggcgagtcgtgtacgttttatgtttttgtttttgttaattacgcgttaggattttagttttacgcgtttatttttttttttttttagttgtcgttatcgtagcgttttttcgtttttttagtaatttgagtcgttataggtgggagaacgtttcgttgatcgatcgttacgagtttgtaaaaggagcgcgtcggcgcgtgagcgaggtgcgcgcgtacgcgtttcgtttttttagtcgttgttgattggagaggttcggatttagtttagagattcgatagggcgaggaggagaagcggattgtcgtagttgaagagtttggacgttgattggtttatttgttttcggggcgggtttagaacgtttaaatttttcgttttttgtcgttgtttagtagtcgggtttttagtatttattgtttttgggatttgattggcgtagtgggaagttcgcgagaaggtcggattagggttcgtagttttagtttttggaaggggtttgggatcgttgcgggggttttgagggggaggttaaatttaaagagttagaggcgtttatttttttttttgtaataatttttaagttaatatttgtattttttgagttaatatttatatagagtttagaatagtgtttggtaaataaagtaagatttaaatgagcggtgttttaaataaataagcggaaataagtaggatttttgttttagttttatcgtgtttgttttttgggtatagggtatgattatttttataatggtacgatagggtttaatttattatttaaattttttaagtagaggtggaagtattcgaattatattaaattttggtagagagaagtagttttgattagaatatttatatttttattgggatatgtttatattttttcgtatttttatatatttttgaagatagagaggtatttattatttatgtattcggtaattatttagtgtttattttgggttaggggttggatttaaagcggtgaatataatgaagttattgttttataaagtttatttgtgcgtttgtgtgtgtgtgtgtgtgtgtgtgtgtgtgtgtgtgtgtgtgtgttgcgggggtggggttatgagggagaaagaaaaaaaatatatatatatatatatataatttttttaaatgtattattttttttagttttgtttttagtattttgagatggggagatttttttttagttttttaatttaagaagttaggaaagatggtgggggtgagatgatttagttgtgttaattagtaattggaaaattttttttagtaagaaaggtgggggaatagagttaagggttgggttaatggttatttttggtaaatttgttgagtaatggagttatagaaatttggaggaggttggtgatagttttggggagtgttagggagggatttattttttaatttggggtgtgaagagattagggattagtttattaagtttaggaaggggagggagtggaaagagaagtttagagagggaaagaggagttattgagataggagaaatgtagggatagggaggtgagatggagggaaatttttgttgtaggatttgggggtatagttttggttttgttggatggttttaggagagggtagcgttgtttgttatttggtaaattaaggtacgatattttgtgggtagttatgttagttagttaaagttaatattgatattaaggtagttgtagttataaagttgtaggagagaaaagagaggtcgggagaggttgttaaatttgtttgatttttaagttggttttatttatttaaggttttttttggatatagattagttggaataggagaggattttgagaagtagagttgttttgattttttttttttaatgggaaggggttttgtgtgtagattttgagggttattatgagggaatttatatttatatagaggtatggaattatatttttataggatgttatagtttaagggaacgaatattaaagatagtttttttgtcgggaggagagaaaaaggtttttttataagtaggagaaaatttatagaagaggaagtataagaggaaattattaattgttggtttttagtagtatattacgttattttattttattttttttttaagtttttttttttttttaagttttaagttttgttttagttttgtgtttttgtattttattatggttttttggaattgtaggttttttgttggatagagggtgatgaggaggatagagaagggatggttggataggagagaaatttaggatatggaggttggaattttgggtttatttttttagtaggttataaaggtttaatagaaattaaggttattggagagagagttgttttttttatgttttttttgtttatttatttaggtgtttttaaggattttatttttattattttgtttgatttttttttatttttatgataggattagttaataatatttttattttattttttatatatatattttaggatcgggttatgataattttatttttttgttttatttttaaggtaatttgttagtgagacgaggataaagggtataggaaggggttttaataggaaatataagtggaagtataaagttgattaagttataggaatagatttttttttgtaataaagttttttgtttcggttttatgtttttttcgtaaaagatttcgttatttttttttttatttttaattttattttttttttttttttttttttttttttttttttttttttttgagatggagtttcgtttttattgtttaggttggagtgtaatggtattattttagtttattgtaatttttatttttcgggtttaattgatttttttgttttagttttttaagtagttgggattataggtgtttattatttcgtttggtaaatttttgtatttttagtagagatagggttttattatgttggttagtttggttttgattttttgattttaggtgatttattttttttggttttttaaagtgttgggattataggcgtgaattattttattcggtttttaattttattttttatgtttaattttaagtgtaggttataaggattgtaagttttagtgttgagttgggttcggagatagtagattgcggggggtataggatttattgagatattagtttgggtagtttagggagtgttggcgttattttttttttaattttaggttgtatggttaacggtttttatttgtagttttagttttttattttcgagttttttttttagattatagttttagtaatttagaatttggattggagtttggaagaaatgtagaatgattaaacgattatttttttatttgaagtttttatttttgaatttttacgggtgtgtttaagttgttagtgttaagttttttatatgagggttagtcgggttgtatttagattaatgaagtagggaaattgaggtagaaaagagttttgtgtttaggagaggtcggagaaataaggaggtttttaggatttttttttaatatttttatttttattttgtgggagattcgaggatttttttttcggatttattttttatatcgtcgagtttcgtttttttttagttttttttttaggtttagggcggggtcggtcggtgagttagcggttttttgatttagttcgggagaggatcgagttggaggagttgggtgtggggtgcgttgggttggtggggaggtttagtttgggtgtaagtaggtttgattgagtttgtgttgtgttgaagggatagttttgggtttaggggagagagtttttgagtgtgagattcgtttttttcggttttagttttttttagtttttttagggacggttattttttggttttcgacgtaattatggttgaagaataatcgtaggtcgaattgttcgtgaaggtaagaatatttttttttttagttatttaaatttttggaagttaatttttatttttttttcggtttagttttaattttttaattttttttttttttgatttttatttttaattttacgtgtattttttggttgaggggtggttttgagaggggaagatattaatttgttagtaagtaatgagaattttaggattaattttgaaaagtttgtaaaagtgtaagtttttagtagattaaaggaagggaagtggagaaaaaggagaatttttaaaagtgagattggggtggggttagagggcgagttggtgaagggatagtgggggtttagtagggtttagaagggatagaggggaattttagttaggatatgtgtttttataagatttgagggtgagtagtgtagtaggagaggtgtgtgtgtgtgtgtgtgtgtgtgtgtgtgtgtgtgtgtgtggatggagacgttttagggaagacggtgtgttgagggaggtttgagagtgagagtaagtaaattgggaagttttggaggggcggaataaaataggagattgggatcggagtttgaaaagtagagttggagaggtgatcgggtggtattgaatatttttaggattggggaaagggatagaaggggaggtggtaagaagacgtgagtttaacgtagttattataaggatgggtgggagagagattagacggaggagaagagttcggttagggtattttgggatttgggggttggagaagtagaagatttgttttaatttttttttttttttgcgggtgtgggtaaggagagatggttttatggtatttgggtagtaaaattgtaggtagtaggtttttcggtgttatttagtttttttttgattgtagcggtcgtttttttttttatcgttgttgtatttattttttagttttgggattttttggttgtgttttttttttttttttttaatagtgttttttttttttcgtttcgtttgtgttttttcgttggtacgtacgtttttttattttttatttttttgtcgtttttttttttttttttttttttttgttttttttatttttgtgtgtttttgtttgtgttttttttttttttttgtttgggtttttcgggtagttattttttttttttgggtttagggaagtcggagtttgtttgggttcgtttttttaggtgtggtttttattttatttttatattcgttttcggggttatttttattcgtgggtgaggttgtgtcgtaga

SEQ ID NO: 35 - DNA, 9347 bp, Artificial Sequence
  chemically treated genomic DNA (Homo sapiens)
tatcgaaggaggttatgttgaagttagtgttattagtaataggaagaaggtaaggatgtttattgtgatttaataatgattttaaggtttggtttaatgtattaagataggaaaataaaatgattagtattaatatttgagaagaagggaaaaatattttttattagaaaatgttattataatttaggaaatttgagatttttttaaaatattaatattattaagagaatttggttaaagtgattggttgtaagaaatatgtttaaggttgggagttgtggtttatatttgtaattttagtattttgggaggttgaggcgagtggattgtttgcggttagtagttttagatttatttgggtaatatggtgaaattttgaatttatagaaaatttaaaaattagtcgggtatagtggcgtatatttatagttttagttatttgggaggttgaggtggaaggtttgagtgattgtaattatattattgtattttagtttggttaatagagtgagattttgtttaaaaaaaaaaaaaaaatttataatttaaaagttagtaatttttttttaattggtaatgataaaataaaaaataatacgggagaaatattatatttataaaagtaatagaagatattgtgttaataaattgaataaaaatagggtttatatgggaaaaattataaaattggattgatagataaagataaaaagtttaaaaaaatgaagagatatattaggattttgtttggaatgtttaaagtatttattttttttaaatatataaaaatatttaagttttttttattagaatggagggggataggatatattgtataaaatgattttaaaagtttaaaatggttttttaaaaattaggttaggtatagtgatttatatttgtaattttagtattttgggaggttaaggtaagaggattgtttgagtttaggagttttagataagtttgggtaatatagtaagattttgtttttattaaaaaataaaaatattagttaggtgtgcgtggtggtgtaattttagtattttgggaggtcgagattggtggattatttgaggttaggagtttgagattagtttggttaatatggtgaaattttatttttattaaaaatataaaattagttgggtgtggtgatgggcgtttgtagttttagttattcgggaggttgaggtatgagaatcgttttaatttgggaggcggaggttgtagtgagtcgagatcgttttattgtattttagtttgggtaatagaatgagatattgttttaaaaataaaaataaaaataaaaataaaaataaaaaaatagttaggtgtggtggtgcgtgtttgtagttttcgttatttaggagattgaggtggggggatggtttgaatttaggagattgaggttgtagggagtttgattatattattgtattttagtttgggtaataaagtaagattttgtttttttttaaaaaaaatagtaaaatgttttaatagttttgggaagttattgtaaagttatttggggtaaatattattaagtgtttatttagtattaattttttttttagtaataaaatttgtatattgatggggtagtaatgtgtttttttaataatattataatataatttttaaatttataaggaggtttttttagttttttttaaaggtatggttatgtggttaaagtataagtaaaagtggttgggaaggatttttagaaagatttttttttaaaaatggatagataacggtttgtaaaagttatttttttgttttttttttttttttttattttatttttttttttattttttttttttgttttatgtttttaaaattttatttgtttttttttttttttatttttcgttatttggaatggaatgtgaatttgatggttggaattttagaagttattttggataatgaggtgattgtaaggatggagattaattcgaggatagtggagtggaacgatggaggtttgatgaacgtgaagttattattttagttttgggttatttatttttgaaattattttatttgacgagagaaataaatttttattttgttttagttattattgttttaggatttggttatgttatagatttaaaatttatttgatttatttttgtaattaaaatatattgatatagaaaagataataaataaattagtggaataaaatagaaaatttagaaatagatttaagtgtttatggggatttgatatatgaaagattataatttaagttagttgaagaatgttttatttattaagtataattgttgatatgttggttgtttgttaggaataaaataaagttaaatttttttttatattataaataagattaattttaggtggattagcgaattaaaggtaaaacgtaagtaaaattaataaaataaaaattggaagaatatttgcgtaagtttaggtcgaggagattttattaaataaagtaggaaatttaaaatttatataggaaaagaattgtatagtgttgtgtggtagaaaaaaaaatttataaagttaaaagataggttgggaaaaatatgtatgtaatatatttgatatttattggttattgttgatggtgggaaattgtaaatatttttcgtaaagagttagagagtaaatatttgaggtttaagggtgtgaattttaaaagaggtttatgatggattcggagtggttaattaggtttaaatttaaaatatagttaagtagttattggttgattagaggttatatatatttcggtttttgtttgtttttttttttttttaggcggagtttcgttttgttgtttagattgtagtgtagtggtataatttcgatttattgtaagtttcgtttttcgggtttacgtcgtttttttgttttagttttttaagtagttgggattataggtgttcgttattacgttaggtttttttttttttttttttttttttttttttagtagagacggggttttatcgtgttagttaggatggtttcgattttttgatttcgtgattttttcgtttcgattttttaaagtgttgggattataggcgtgagttatcgtattcggtttttgtttgttttttgagatacgattttgttttgtcgtttaggttggagtgtagtgaggcgattatgatttattttagtttcgatttttcgaatttaagcgtttttttagttttagtttttagagtggttgagattataagaattcgttattatcgttcgttaattttttgtagagaaggggtttcgttacgttgtttaggtcgattttgaatttttgggtttaagttaagggaggagattattttttatattgttttacgtttaatttttgtttttaaagaaagaaaaagtaaaattaaaaggtagaaatgaaatttataagtagatagttcggttttatattttaggtttggtaaagatggatttttgatttaattagttatgttatttatagattatagatattgtatagaaaagtattgtgaaaatttttattttgttttgttttgatttaattattggtgtatgtagtttttagttacgtattttttgtttgtttaattgattacgatttttttaggcgtatttttttagagttgtgagtttttaaaagggataggaattgtttattcggggagttcggttggtgagataggagttttgtcgatgattttagtcgaataaattttttttttttttaattcgggtgtttgaggagttttgtttgtggttcgttttgttataaagtgattcgtttgtttcggttttttaaatgttgggattataggcgtgagtgatcgtatttggtttgggatggatattttaaaggtttttgatatatattgttaaattgttttttcgaaacgttttatattattttattagtattgtatgacgtttacggttgagatttttggtttaaagaattacggtgtattttaaggggagaattttttttttattttatttttaaattttatttttgagtgatttatttttatttttaagtttttagttatttattgggaatttttatttggaaattttagaggtatttaaatttaacgtgtttaaaattaaattattcgttatttttttattttatatttttttaaatgttttagatttagaaaatatatttattattgtggttggtattacggtgataagtacgataataattatggtaattagattttttattgaagttatttttttaggatgaattaagggtataataggtagagatgataaggggaatggagaagggggtatagtaagttttagatagtcgaaggtacgcgtacgataacgtttgcgtattacggaatagggtaaaagggtgataaatatgcgttattgagttttatcgagtagtcgatgtttagaaaataggtattcgtatatagatttagtttttttgtaggtaattttcgggcgttgcgagttataatcggtattttcgcgtcgtgagagagaattgcgtagttgttgattggcgggtcgttaggcgcgtgcgtagagacgtttatacgttcgttgatgcgtacgcgttttgggtcgcgcgtgcgcgcgtggggtttcggaatgagtcggggaaagtaaggggaaggtttggggttggttttcggtttcgcgtatgcgtgtattgtataaattatttggcgggttttttcggttatttagttttgttatcgttattgagaagtttagcggtagtttttgggaagtaggacgtttttattaggagagcgttttttcgagatttttgttttttttatttagggcgtttgggagttatttttttattttttaaaaaaagtatttttttgtgatcgacggtcggggttttttgacggtttgaggttttgtttgggttagttattttttgttacggttcgcggaggggggaaggataagagggcgaggagtttatcgttcgttattttcgtgggttttttgggcgtaggtcggagttgggtgggtcggtttttcggtttttggtttgggcgattatgttcgtattcgtttagtagttggcggaggagttgtagattttcggtttagattgcgaggaggttttaattgagaaatgtgagtttcgtatttttttcgttttgtagtcgtgttttacgttttcgttcgagtttttcggcgtttagaatcgaaagtggagcgtttttaatttttattttttttggagtagagttttcggtggttgtgagatgaagaattaaatttgagttttgagatttaggatgtggggattttgaaatgtttatcgggtatcgtttggatgttaaattaaaaataggaatatgtagtacgattttaaattaattcgaagttttcgaaaggcggaattgggatgtgttagatagagattaggtattggtggtatttgagtttggaaattgttgaagtttcggtaataaagtaatagatgtgggggttttgaaatgtagttttttatttttggtttttttttttttagtttatattttaaatttttgttgatttattagttattttattatagttgttggtggtttgtgtaaatatgaattttttgaggtaggtttttaaaattgaatttgagttgtggaaggagttttagggagttttatagatggagaaatagataaggaaagttaattgtttgagttgtttgtgaagttaggtgttttgttttggagtttcgtgttgtattatacgggtttatcgtgttggttaagttgtagagtagtgtaaggagttatttgaagtaaagtttgggagatgtggaagttttagaatcggtatgaatgtgtatttgttttaattatttaatattttgaattttttatatataaaaagataacgaaacgttaatttatggtgagaaattttttttagaaattagaatattttaagtttttatgtttagtgttttttttttttttttttttttttttttttttttttgatagttttgttttattatttaggttggagtgtagtggtgtaatttcggtttattttagttttcgttttttaggtttaagcgatttttttgttttagttttttaagtagttgggattataggcgttcgttattaggttcgattaatttttttttgtatttttagtagagaaggggttttattatgtaggttagattgttttcgaatttttgattttaagtgatttatttattttggttttttaaagtgttgggattataggtataagttagtaggttcggtttttttttttttaaaagaagattagttaggtgtggtggtttacgtttgtaattttagtattttgggaggttaaggtaggtggataatttgaagtcgagaatttgagattagtttgattaatatggagaaattttgtttttattaaaaatataaaattagtcgggcgtggtggcgtatgtttgtaattttagttatttaggaggttgaggcggaagaatcgtttgaatatgagaggtagaggttgtggtgagtcgagattatattattgtattttagtttgggtaataggagcgagattttgttttaaaaaaaaaaaaaagatttaagtggaaaatttgattatagttagaaatgtatgtggtaagtatgaaattagtatgagagaaattagttatgtgaattagatttgtaaaggttttaggttaagatgttagttgtttttattttatggtaatggttttggaattgtggattttggattattagtaattttagtggtattttaatgttttttgatagttaatcgtatttttttgttttttttgttgttgtttgttttgttttttgagatggagttttttattgtttaggttggagtgtaatggtgtaattttggtttattgtaatttttgtttttcgagtttaagcggtttttttgttttagtttttcgagtagttgggattataggttttcgttattacgttcggttaattttttgtatttttagtagagatggggtttcgttatgttgggtaggttgatttcgaatttttgatttttagtgatttttttatttcggttttttaaagtgttgggattataggtgtgagttattatatttgttttattttttgtatttttagtagagataaggttttattatgttggttaggttggtttttaatttttgattttaggtgattcgtttattttggttttttaaagtgttgggattatattgcgttaggtttttggtttttttattttgagttttttagatgattgttttttatttttttttgtaatatttttttgttttatttttatttttagttgataaatttttattatttgttgaaaaatgtagaagtattagaaaatttcgattagttattattattatgttttattgatttatatttgtggtatatatttagtttttttttttattataatgaataagtttttcgtatttttagtaaaatttaagttttttatttgagttttaaattttattttttttgaagtaattaaggatattattggtaatttttttgttttatatattttttattttttttgttataagattttttttttattagtatagaaatgtgtttttaattttgtttttaaaatattttgttgattttattttttattttagtttttttttttttaattatagtagattttaaaagggtcggtcgggtgcggtggtttacgtttgtaattcgagtattttgggaggcggaggagggcggattataaggttaagagatggagattattttggttaacgtggtgaaattcggtttttatttaaaatataaaaattagttgggtatggtggcgtatgtttgtagttttagttatttgggaggttgagataggagaatcgtttgaatcggggaggtggaggttgtaatgagtcgagatcgtgttattgtattttagtttggtaatagagtgtaattttgtttttaaaaaaaaaagggggggggttttgttatttttaaatattttttttttaaatttattttagtaagtttttttgttgttattattttattaaagttgttttatttaaggttattagtgatttttattatgttaaaattagtgatgaatttttagtttttattttgaattgaattagtatcggtatttgatattgtttgttattttttttttttttaaatatattttttttttagttttttagatattattagttttttttttttttttttttgagatagggttttgttttgttgtttaggttggagtataatgggtaaattatagtttattgtagttttaatttttttggtttaagtaatttttttattttagtttttaagtagttgtaattataggtatatgttattaagtttatttaattgttgtattttttatagaaacggttttattttgttgtttaagttggttttaaatttttgggtttaaatagtttgtttattttaattttataaaatattggattataggcgtgagttattgtattcggtttatttttagtttttttttagttttgtttgtgttatcgttttttaggttttgtcgatttatttttagaggttttaaggcgttttaagatttaagtttgggatttttttttttttttagatacgtttatttttttggcgattttatttggggttttatagttttatattttatgtatttattgatggtttttaaatttatattttcgtttataatttttgtttgaattataggttggtttgtttagtttgttgtttttagttggatgtttaaatggtattttaaattttgtatgtttaaaattaagtttttggtattttttttttttttttagagtagtttttttggtttttttttttattttagttaatagggacgttattttttttgttgtataggttaaaaatattagtattatttttgatttttttttttttatattttatatttagttagtagattttattggttttatttttagtatgtaaagttttatttagagtttagttatttttcgttatttttattgttattattttgatttaagttattattattttttatttgggtttttttatgattttttaattggtttttttgattttgtttttatttttttttgtttttttttagtggtgagttttgtaaggataaggatgtttttgtttttttattgtttaaaatagtgtttggtattaatagattttgaataaatattgatggagtaaattaggattatttttgtttttttaggtgaaatttcgagaaatgaattaagtttttatttgtttaatttttttttttatagt

SEQ ID NO: 36 - DNA, 9347 bp, Artificial Sequence
  chemically treated genomic DNA (Homo sapiens)
attgtagaaaggaaaattggataagtaaaaatttagtttatttttcgaagttttatttagaaaagtaaaaataattttggtttattttattaatgtttatttagaatttattagtgttaggtattgttttgggtaatgagaaaatagaagtatttttgtttttataaagtttattattgaggggagataaaagaggataagggtagaattagggggattaattaaagaattatggaaaagtttaggtgagagatgatggtggtttggattaaggtggtggtagtggagatggcgagaagtggttggattttggataggattttatatgttggaagtgaagttagtgggatttgttaattgaatgtaaggtatgagaaaaagaaagttaaggatgatgttgatatttttagtttgtgtaataggaagagtggcgtttttattaattgagatggggaaaagagttagaggaattattttgaggagagagaggagatattaggagtttagttttagatatgtagagtttgaggtgttatttagatatttaattggagatagtaggttgaataaattagtttgtagtttaggtaagggttgtgggcggaggtataaatttgggaattattagtaaatatatgggatataaagttatgagattttaggtgagatcgttaagggagtgagcgtatttagaagggagaaaagattttaggtttgagttttggggcgttttagggtttttgaggatgaatcggtaaagtttgagaagcggtgatataagtaaagttgaagaaaaattaggagtaagtcggatgtagtggtttacgtttgtaatttagtattttgtgaggttgaggtgggtagattgtttgaatttagaagtttgagattagtttgggtaatagggtgaaatcgtttttataaaaaatataataattaggtgggtttggtggtatgtgtttgtagttatagttatttgggggttgaggtggaaggattgtttgagttaaggaggttgaggttgtagtgagttgtgatttgtttattatattttagtttgggtaatagagtaagattttgttttagaaaaaaaagaaagaaaaattagtagtgtttaagaagttaaaagaaaaatgtgtttaaaaaaagaaaaaatgataaatagtgttaagtgtcggtgttaatttaatttaagatgaggattgaaaatttattattggttttagtatggtgaaggttattggtgattttgagtagagtagttttggtgaagtggtggtaataaaagaatttattgaaatggatttaaggaggaaatatttaaagatggtaaggtttttttttttttttttttggagatagagttgtattttgttgttaggttggaatgtagtggtacgatttcggtttattgtaatttttattttttcgatttaagcgatttttttgttttagttttttaagtagttgggattataggtatgcgttattatgtttagttaatttttgtattttaagtagagatcgggttttattacgttggttaggatggtttttattttttgattttgtgattcgttttttttcgttttttaaagtgttcggattataggcgtgagttatcgtattcggtcgatttttttgaggtttgttgtaattgggaaggagagaattggagtgggaagtagggttaatagagtattttaaaggtaagattggaagtatatttttatattagtaggaaaaaaattttgtagtaaggaaaatagaaaatatgtaagataggagaattattagtgatgtttttaattgttttagaaggaatggggtttaggatttaagtggaggatttggattttgttaggaatacggaaagtttatttattataataggaaagaaggttaggtatatgttatagatatgggttagtgagatataatggtggtagttgatcgaagttttttaatgtttttatattttttagtaaataatagaaatttgttagttgagagtgagggtgggatagaaggatgttataggagaaggtggaaaataattatttggaagatttagagtaaagagattaggggtttggcgtagtgtaattttagtattttgggaggttagggtgggcggattatttgaggttaggagttgaagattagtttggttaatatggtgaaattttgtttttattgaaaatataaaaagtagaataggtgtggtggtttatatttataattttagtattttgggaggtcgaggtgggaggattattggaggttaggggttcgagattagtttgtttaatatggcgaaattttatttttattaaaaatataaaaaattagtcgggcgtggtggcgggagtttgtaattttagttattcgggaggttgaggtaggagaatcgtttgaattcgggaggtagaggttgtagtgagttaagattgtattattgtattttagtttgggtaatgagaaattttattttaaaaaataaaataaataataataaaaaaaatagggaaatacggttgattgttaggaaatattaaggtgttattgaagttattgatgatttaaagtttataattttaaagttattgttatgagatgaaagtaattggtattttggtttgaagtttttataaatttggtttatataattaattttttttatgttgattttatgtttattatatatatttttgattatgattaggttttttatttaagttttttttttttttttgagatagagtttcgtttttgttgtttaggttagagtgtaatggtgtgatttcggtttattataatttttgttttttatgtttaagcgattttttcgttttagttttttgagtagttgggattataggtatgcgttattacgttcgattaattttgtatttttagtagagatagggtttttttatgttggttaggttggttttaaattttcgattttagattatttatttgttttggttttttaaaatgttgggattataggcgtgagttattatatttggttagtttttttttaaaaagagaaggatcgagtttgttggtttatgtttgtaattttagtattttggaaggttaaggtgggtggattatttgaggttaggagttcgagagtagtttggtttatatggtgaaattttttttttattaaaagtataaaaaaaaattagtcgggtttggtggcgggcgtttgtaattttagttatttgggaggttgaggtaggagaatcgtttgaatttgggaggcggaggttgaagtgagtcgagattgtattattgtattttagtttgggtgataaaataagattgttaaaaaaaaaaaaaaaaaaaaagagagagagagaaggtattgggtatgaagatttgaagtattttggtttttgaaaggaattttttattataaattaacgtttcgttatttttttgtatataagaagtttaaagtgttgagtggttaaggtaggtgtatatttatatcgattttagaatttttatattttttaggttttgttttaaatgattttttatattgttttatagtttgattaatacgatggattcgtatgatgtagtacgggattttaaggtaggatatttggttttatagatagtttaggtaattagttttttttgtttgtttttttatttgtaaagttttttaaagttttttttatagtttaaatttaattttaggaatttattttaagggatttatatttgtatagattattaatagttatgataaaataattgatggattagtagaggtttaaggtgtaggttggaaagggaggagttaagaataaaaagttatattttaaaatttttatatttgttgttttgttatcggggttttaataatttttaaatttaggtgttattagtgtttagtttttatttagtatattttaatttcgtttttcgggaatttcgagttggtttaaaatcgtgttgtatatttttatttttgatttggtatttaagcggtattcggtgggtattttaaagtttttatattttaaattttaaaatttaagtttgattttttattttatagttatcgagaattttgttttaggggaagtggaaattggaagcgttttattttcggttttaggcgtcgaggaattcgggcgagagcgtggagtacggttgtagggcgggaggggtgcgggatttatattttttaattagagttttttcgtagtttaggtcgaagatttgtagttttttcgttagttgttgggcggatgcggatatggtcgtttaagttaggggtcggggagtcggtttatttagtttcgatttgcgtttaagaagtttacgggggtggcgagcgatgagtttttcgtttttttatttttttttttttcgcggatcgtgataggaggtgattggtttaagtaagattttagatcgttagaaggtttcggtcgtcggttatagagaaatattttttttaaaaaatgaaggggtggtttttaaacgttttgaatggagggagtagaaatttcgagaggacgtttttttggtgagaacgttttgttttttaaaagttatcgttgagttttttagtgacggtggtagaattgagtggtcggaaaaattcgttaaatggtttgtgtagtgtacgtatgcgcgaaatcgggagttaattttaaattttttttttgtttttttcggtttatttcggaattttacgcgcgtacgcgcggtttagggcgcgtgcgtattagcgggcgtgtgggcgtttttacgtacgcgtttggcggttcgttagttagtagttgcgtagtttttttttacggcgcgagaatgtcggttgtgattcgtaacgttcgggagttgtttataaggaaattgagtttgtgtgcggatgtttgttttttgggtatcggttgttcgataaaatttagtggcgtatgtttgttatttttttgttttgtttcgtggtgcgtaggcgttgtcgtgcgcgtgttttcgattatttaaaatttattgtatttttttttttattttttttgttatttttgtttgttgtgtttttggtttattttaaaagaatggttttagtagggaatttggttgttatggttattatcgtgtttattatcgtggtgttagttatagtgatgggtatgttttttgaatttggggtatttggggggatatgaggtgggaaggtgacggataatttagttttggatacgttaagtttgagtgtttttgggatttttaggtagagatttttagtgggtgattggaggtttgggagtgaaggtaggttatttaaggatagagtttaggggtaagatgagaagagggttttttttttgaaatatatcgtaattttttgagttaaaaattttaatcgtaggcgttatataatgttggtgggatggtatagagcgtttcgagaaaataatttagtaatatgtattaggaatttttaaaatgtttattttaggttaggtgcggttatttacgtttgtaattttagtatttgggaggtcgaggtaggcggattattttgtagtaggacgagttatagataaaattttttagatattcgagttaaagaaggaaggggtttattcggttggggttatcggtaagatttttgttttattagtcgagtttttcgaatgagtaatttttgttttttttaagggtttataattttaagggggtgcgtttgagagggtcgtgattaattgaataagtagggggtacgtgattgggggttgtatgtattagtaattagattagaataaaataggatagggatttttatagtgtttttttatatagtgtttgtaatttatagataatataattgattaggttaggggtttatttttattaagtttagggtgtgaggtcgggttgtttgtttgtggattttatttttgttttttagttttattttttttttttttggaggtagaaattgggcgtaagataatatgaggggtggtttttttttttaatttgagtttaggagtttaagatcggtttgggtaacgtggcgaaattttttttttataaaaaattagcgggcggtggtggcgggtttttgtgattttagttattttgggggttgaggttggaggagcgtttgagttcgggaggtcgaggttgaagtgagttatgatcgttttattgtattttagtttgggcgatagagtaagatcgtgttttaaaaagtaaataaaggtcgggtgcggtggtttacgtttgtaattttagtattttgggaggtcgaggcgggaggattacgaggttaggagatcgagattattttggttaatacggtgaaatttcgtttttattaaaaaaaaaaaaaaagaaaaaaaaaagaaagtttagcgtggtggcgagtatttgtagttttagttatttgggaggttgaggtaggagaacggcgtgaattcgggaggcggagtttgtagtaagtcgagattgtgttattgtattatagtttgggtaatagagcgagatttcgtttaaaaaaaaaaaaaagtaaataaaaatcgaagtatgtgtgatttttagttagttaatggttgtttggttgtattttgaatttaggtttagttagttatttcggatttattatgaattttttttggggtttatatttttaagttttaaatatttattttttggttttttacggaaaatgtttgtagttttttattattagtaataattaatggatattaaatgtgttatatatatattttttttaatttgttttttaattttgtgggtttttttttttattatataatattgtgtaattttttttttgtatgggttttaggttttttgttttgtttaataaggttttttcgatttaagtttacgtaaatatttttttaatttttgttttattaattttatttacgttttgtttttagttcgttaatttatttagaattaattttatttgtgatgtgaggaaggatttagttttgttttatttttgataaatagttagtatgttagtagttatatttagtaaataaaatattttttaattgatttgaattgtgattttttatgtattaagtttttataaatatttgaatttgtttttggattttttgttttattttattgatttatttgttgttttttttgtgttaatatattttgattgtaggagtaaattaagtgggttttagatttgtgatatagttaagttttaaaataatagtagttgagataaaatagaagtttatttttttcgttagataaaataattttagagataggtagtttagggttaaaatggtggttttacgtttattaggtttttatcgttttattttattgttttcgaattaatttttatttttatagttattttattgtttaagatggtttttggaattttagttattagatttatattttattttaggtagcggaaagtaggaagaagaaagggtaaataaaattttaaaaatataaagtaagaaaagagagtgaaaagagaaatgaaatgaaaagggaaaaaagaaataaaaaaatgatttttgtaaatcgttgtttatttatttttgaagaggagtttttttagaagttttttttaattatttttgtttatattttagttatatagttatatttttaaaggaggttgggaaagtttttttataggtttaaaagttatattgtaatattattgaggaaatatattgttattttattaatatataaattttgttattaagaaaggagttaatattaggtaagtatttagtagtgtttgttttaggtagttttatagtaattttttaaaattgttgaagtattttattattttttttggggggggataggattttattttgttgtttaggttggaatgtagtggtgtgattaagttttttgtagttttaattttttgggtttaagttatttttttattttagttttttaagtagcggggattataggtacgtattattatatttggttgtttttttgtttttgtttttgtttttgtttttgtttttgagatagtgttttattttgttgtttaggttggagtgtagtggagcgatttcggtttattgtaattttcgttttttagattgaagcgatttttatgttttagtttttcgagtagttgggattgtaagcgtttattattatatttagttagttttgtatttttagtagggatggggttttattatgttggttaggttggttttaagtttttgattttaggtgatttattagtttcggttttttagagtgttgggattatattattacgtatatttggttaatatttttgttttttaatagagataaggttttgttgtgttgtttaggtttgtttggaatttttgggtttaagtaatttttttgttttggttttttaaagtgttgggattataggtgtgagttattgtgtttggtttagtttttaggaaattattttaaatttttaaagttattttatatagtatattttatttttttttattttgataggaaggatttaaatatttttatatatttaggagaaatgaatattttaagtattttaaataggattttggtatatttttttatttttttaggttttttgtttttgtttattaatttaattttatagttttttttatatagattttgtttttgtttaatttattgatataatattttttgttgtttttatgaatgtaatgtttttttcgtattgttttttgttttgttattgttagttaaaggaaagttattggtttttggattgtaaattttttttttttttttagataagattttattttgttgattaggttggagtgtagtggtgtgattatagttatttaagttttttattttagttttttaggtagttggaattataggtgtacgttattatgttcggttaatttttgaattttttgtagatttagggttttattatgttgtttagatggatttggaattgttagtcgtaaataatttattcgttttagttttttaaagtgttgggattataggtgtgagttataatttttagttttggatatattttttgtaattagttattttgattaaatttttttaataatattaatgttttaggagagttttagattttttagattataataatattttttaataaaaaatattttttttttttttttaaatattgatattaattattttatttttttgttttggtgtattgaattaaattttggaattattgttgaattatagtaggtatttttgttttttttttgttgttgatggtattggttttagtatggtttttttcggtg

SEQ ID NO: 37 - DNA, 5501 bp, Artificial Sequence
  chemically treated genomic DNA (Homo sapiens)
ttaatgggtatagataagaaagtttgttttttttatttgcgttagttttttagatttgttttagttagttattataattttggtggtttaaatgatagaaatttatttttttttagtttcggaggttagaagtttgaaataaaggtgtgaataggattatattttttttgaaggttttagggaggttttatttttggtggcgtttagtttttgttggttttaggtaatttttggtttgtgattgtatttttgtttttgggttatattgttgtcgttttttttgttatatttttgttgtgtattttttataagaatatttgttattggatttagagttaatttgaaaaatttagggtaagtattttgttttaagatgttttatgtaattatagtttgttatatgaggtaatgtttataggttttggagattatgatgtggatatttttttgggggttattatttagtttattatagtttattttttggtattttaaaatttatatttgttttatatgaaaaagatatttattttttttaatattttttaaagttttaatttatatagtatgaattaagattaaatttgtatttatatattagtttagaagttttgtattttattatttaagttagatgtgggtgagatttcgtgtatgatttattttaggattaaatttttttggttgtggatttgtgatattataggttattagtttttaaataattttggaatttggataaataaatttatttaaaatgatgtaataggtatatgatagatgtttttattttgaaagggaaaattggaagggataaagaagttattatttttaattaattttgatttagtagagaaaattttattaggatttaaggtttgtaaataattttttagtttgaagtgtcgtttattgggtttataatagttgtgtagatttttgtgtttgtttatagtagaattatgggtttttttgtatttatggtggttttataggtttttgagtttgtgtttatagtgattttataggtttgtgtttttgtatttattatttttgtttgtttttttggtttttgtttttgtgtttttggttttgtttttggagttatttttgtttttttttgaaggatcgtatgtttgtagtttagtagttttattagtttattttttgttcgtagtagtttggattttaatagtttttttttattttatattgtttttgttatttttaggttaagttgtttttgttgatgtaatatttttaaaaattttgtgggttttttgtgtaatgttatggagtttaatgttattagataagagggttttttataaattttttgggataattttatttttatttttgatttttattgagatggttgaatgagtttaagagttttatgttttattttttcgtgttattatatttagtatattttttttatttttgtaaaagagatggggtttcgttatgttgtttagtttggttttgaatttttgggttcgatttttttgtttttattttttagagtgttgggattataggtggtcgtgtttgatattttagtaaaattgtaatttaagttattaattttattgagtatttacgtggaaataaaaattaagttttttttttcgtggagttggtattgtatattggtgggaggaggagtgagtagggagtgtataatgtgtaattacgtgtgaatatttttagttttttttagtattgtgaaggaaatatataagtaaaaatttgggtttggtttaggaacgtgataagggtgtgattgttaggttgggatttgaatgatgagaagaaggtagttagggaaagaattatataatgaggggataatgttgagtaggtatatgtatgtatgaaatatgggcgtgtgtgtgttttaaataatgagaaaagtggtaagaaatgtagtaggagagtaggtaggaggtggattatataaggttttgtgggttatgaaaaggagtttggatttttttttttttttttttttttttttggagatttatttttgttgtttaggttggagtgtagtggttcgattttggtttattgtaatttttatttttagggtttaatttttttgttttaattttttaagtagttgggattataggcgtttattattacgtttggttaatttttgtatttttagtagaaatggggttttattatgttggttaggttgattttgaatttttgattttaggtgattcgtttgttttagttttttaaagtgttggaattataggtgtgagttattgcgtttcgttaggagtttggattttattttaagtgtagtgggagggtgtataaatagggatatattttgatattatattttaaaaagattattttttgtttggggaatattttataagaggataagagtagaagtaggaagtttattgaggaggttttggtaatagtttaggaggttatgggagtttgatttagggtagtggtagttcgggatgagaggttatttagtttagtatatatttttgagatagaatagataaggtttgttggtagacgggatgtggggtgtgaaaagagtaattaaaaatgatttttatgggtttggtttgatagtagggtggattaaaatgttattaattgagatgggggaaagttaaggagaagttggtggggtaagagttaggagttttttaggatattttatttttgagatgtttattatggattagagttatttagtagatagtttgatgtatgagattggaatttaagggagaggttaagatttgaattatgagtttaggagatttttaagttagatatgttatttaaataggtaaaattggataagttggaaaagttggttagaagattgaagtgtgaagttattttttataaaggttggagagtggaggaggagttgggaattagtgtttaggcgtatatgtgcgtatatatatattttgttgaggattggttagtgaggaaaaaggaagtttagagtatgtggaattttagaagttaattgaagtaagttattttaagaagaattttgtgaagtagattaaatgtcggttgttttaagacgataaggatagataatggattattttttttggtttttttggtattaattttaaaaatatagtatttgtaaaaatgggttaggtgtagtggtttacgtttgtaatttagtattttaataggttaaggcgggtggattatttgaggttaggggtttgagattagtttggttaatatggtgaaattttatttttattaaaaatataaaaattagttgggtatggtggtaggattttgtaattttagttattcgggaggttgaggtaggagaattatttgaattcgggaggtagaggttgtagtgagtcgagatcgtgttattgtattttggtttgcgggataagagtgaaattttgttttaaaataaaaaaatttgtaaaattgattttataattttttatatttgtaatttttaaaatttagaggtaaatatatttttatttaaggaggaataattttttagagtaaaataatttgaatattatttggaatagagattggatagaaaaaagtgtgaatagggaaaattaggataagttatatatgtaaatgagagtataaagagtaaatgagagtggttattgtttattgtagtttaattaattagatagttaagttgtaggtataaagtttttttaatttttattttttaagtaataaattgaggaaaatataaatatgtataaaatttttataaaagttatttataaaagggtaagtagtaatatatagaaaagatttattagattagtaataaattatttttattaggaaaatggtaaatgatatgaataggaaatttaaaaaaagaagaattatagatttttaataagtataatttaagatatatattgatattgtaaggaaatataattattataattttgttaattaaagaaattaatgatatttattggaaaataatgggaatttttaatagattgggttagaagattagaagtgtacgttttaaaatattaatagtttagttgtagggtgagattattgattttaattttttttttttatatatttttttagatttttttatagtaattacgtattattttgtaataaattttaatttttcgatgtataaagtaattgtttggaattgtagttcgatatgaatttaggagttacgtttgtaaaataaattattgttgatgtgatatttttattttttaagtagattgtaaattttttagatgtaggttattatgttataattagggttttattgtttatgatttagatgaaatattttttttttttttgtggtttttttattaatttggtttttatcgtaaaggtagggggattaaaaataaaatattttttgatattggttggtaggtgtattaatacgtgtgcgggaggatttttgttttcggtatggtttacgtcgggtttcggtagcgttttagtacgtaaggggttgtattggagtgtggattgttcggtatttttagagaaagttttgatagtgtgacgttagtgtcgtttttaattacgtataaaacgcgttatgtattgggtagttattatagtgtatatttttgtgtaggaagttattttattagcgtaagtattttagaattaagatcgtattttcgtttttttttttagggaaaggattttagataaatattgagaaaatagatttaatattttaggttaaaattttaggtttttttataggaaggtttttgggttgttattttgaggtgtttatttttttcgcgtcgtgtttacgtttacgagtttacgaatttttcgagttttttttttttatttgtcgagggttcgtttttttagtttcggttcgtttcgtttaggacgcgtgacgttataataagcgtcgtgcgtttcgttttttatcgggggtaattattgtttcgtcggtcgcgtcggagttgggttgtttttgttttcgtttttaagttttggtattttttttaagttgggagagggttttagtttttggttttgaatattttggggttttcgggtgtaggtcgttatgagtaaacggaaggcgtcgtaggagatttttaacgggggaattatcgatatgtttataggttagtatcgggtcgggtttcgttggtttttttttttttttttagtttttttttttgtttttttttttttttatatcgatagtttagtgggtagggtaggttttttgtagcgggtcgtttttcgtggggattttttttcggcgtttttggttggttgttagttttgtcggttatatttgggttatcgtttgggttgtttttggtttggtttttgaaggaaacgggtggttattgttttttagaggttgttatatttttttttagaaaatagttttcgtttgtttattcgtggtttttgtttattcgagttttttgttgttttttaga

SEQ ID NO: 38 - DNA, 5501 bp, Artificial Sequence
  chemically treated genomic DNA (Homo sapiens)
tttgaaaggtaatagaaggttcgggtgaataagaattacgagtaaataaacgagaattgttttttggaaggggatatggtagtttttaagagatagtgattattcgttttttttaagggttagattaaaagtagtttaagcgatggtttaggtgtagtcggtaggattgataattagttaggggcgtcggagggagatttttacggaagacgattcgttgtaaggaatttattttatttattggattgtcggtgtgggagagaaggaaggtaggggaagaggttggaaggaaagaagaaagttagcggggttcggttcggtgttaatttgtgagtatgtcggtgattttttcgttgagagttttttgcggcgtttttcgtttgtttatggcggtttgtattcgagaattttagagtgtttagaattagggattagagtttttttttagtttgaaggaggtattaggatttggagacgggagtaggagtaatttagtttcggcgcgatcggcggaataatggttgttttcgatggggggcggggcgtacggcgtttgttgtgacgttacgcgttttgggcggggcgggtcggggttagaggggcgagttttcggtaggtgaggagagagaattcggagggttcgtggattcgtggacgtggatacggcgcgggggaaataggtattttagaatgatagtttaggggtttttttatgggaagatttggagttttgatttaagatattaaatttgtttttttagtgtttatttggaattttttttttagaaggggaaacgggagtgcgattttgattttgaaatatttgcgttggtggggtagttttttgtataaaaatgtgtattgtaatagttatttaatgtatggcgcgttttgtacgtggttagaggcgatattggcgttatattgttaaaattttttttaaggatatcgggtagtttatattttagtgtagttttttacgtattagggcgttgtcggagttcggcgtgaattatgtcgagaataggaattttttcgtatacgtgttagtatatttgttaattagtgttaaaagatattttatttttaatttttttgtttttgcggtagggattaaattaatgaagagattataagaaagggagaagtgttttatttagattatgagtaatggaattttaattataatatgatgatttatatttgagaaatttatagtttgtttgagaaatggaaatgttatattagtaatagtttattttataagcgtaatttttgggtttatatcgaattgtaattttaggtaattgttttgtgtatcgaaaaattaaaatttattataaaatgatacgtagttgttgtagagaaatttggaaaaatgtataaaaggagaaaattaaaattagtgattttattttatagttgaattattaatattttgggacgtatatttttagttttttaatttagtttattaaaaatttttattattttttaataaatattattagtttttttgattagtaaggttgtggtgattgtgtttttttataatattagtgtatattttaagttatgtttattggaaatttgtaatttttttttttttgaattttttatttatattatttattatttttttaatgggggtagtttgttattaatttggtagattttttttatatattattatttgtttttttatggatagtttttgtaaaaattttgtatatatttgtattttttttaatttattatttgaggaataaaagttaaaaaaattttatgtttgtaatttaattatttgattagttaagttgtagtgagtagtgattatttttatttattttttatatttttatttatatatatgatttgttttagttttttttgtttatatttttttttgtttaatttttattttaggtgatatttagattattttgttttgaagaattatttttttttaaataaaaatgtatttatttttgaattttaaaagttataaatgtagggaattgtgggattagttttataaatttttttgttttgagatagagttttatttttgtttcgtaggttagagtgtaatggtacgatttcggtttattgtaatttttgtttttcgggtttaagtgatttttttgttttagtttttcgagtagttgggattataggattttgttattatgtttagttaatttttgtatttttagtagagatggggttttattatgttggttaggttggttttaaatttttgattttaagtgatttattcgttttggtttattaaagtgttagattataggcgtgagttattgtatttagtttatttttataaatattatatttttaaaattagtgttagagaaattaaggaaaataatttattatttgtttttatcgttttagaataatcgatatttgatttgttttataaagttttttttgaaataatttgttttaattggtttttaagattttatatgttttgggttttttttttttttattggttagtttttagtagggtgtgtgtgtgcgtatatgtgcgtttgagtattggtttttagttttttttttattttttagtttttatgggaaatggttttatattttagttttttaattagtttttttaatttgtttagttttatttgtttaaatggtatgtttagtttgaaagttttttaaatttatagtttaagttttgattttttttttgagttttagttttatatattaggttgtttattggatagttttagtttataataggtattttaaagataaaatgttttaaagaatttttgatttttgttttattagtttttttttaatttttttttattttagttaatagtattttaatttattttgttattaggttaaatttataagagttatttttaattgttttttttatattttatatttcgtttgttagtagattttgtttgttttgttttaggaatatgtgttgaattggatgattttttatttcgagttgttattgttttagattaaatttttatgattttttgaattgttattaaagtttttttagtgggttttttgtttttgtttttgtttttttatagaatattttttaaatagagggtgatttttttaggatgtagtattaaaatatgtttttatttatatatttttttattgtatttaggataaaatttaagtttttggcggggcgtagtggtttatatttgtaattttagtattttgggaggttgaggtaggcggattatttgaggttaggagtttaaggttagtttggttaatatggtgaaattttatttttattaaaaatataaaaattagttaggcgtggtggtgggcgtttgtaattttagttatttgggaagttgaggtagggaggttgaattttggaggtggaggttgtagtgagttaagatcgggttattgtattttagtttgggtaataagagtgagtttttaaaaaaaaaaaaaaaaaaaaaaaaaaatttaagtttttttttatggtttataaggttttatgtgatttattttttgtttgtttttttattgtattttttgttattttttttattgtttaggatatatatacgtttatattttatatatatatgtgtttgtttagtattgtttttttattgtatggttttttttttggttgttttttttttattatttaggttttagtttggtagttatatttttgttacgtttttggattaggtttaggtttttatttgtgtgttttttttatagtattaagaaggattggaaatatttatacgtggttgtatattatgtattttttgtttatttttttttttattaatgtgtaatgttagttttacgggagaagggatttaatttttgtttttacgtaagtatttaataaagttaataatttaaattgtagttttgttgaagtgttaaatacggttatttgtaattttagtattttgggaggtggaggtaggaggatcgagtttaggagtttaagattagattgggtaatatggcgagattttattttttttataaaaataagaaaaatgtattgggtgtggtggtacgaagagatgaagtatgggatttttggatttatttaattattttagtagaagttaggaatagagatgggattattttagaaaatttgtggaggatttttttgtttaatggtattgaattttatgatattatataggggatttataagatttttgagaatgttatattagtagagatagtttagtttggaagtgatagagatagtgtgaaatgagaaaaggttgttgaaatttaaattgttacgggtaagaaatgggttgatagagttattgggttgtaaatatgcgattttttaagaaaaagtaagaatgattttaagggtagagttaggggtatagaggtagaggttagaggagtagatagaagtgatggatgtagagatataggtttatgaggttattgtgagtatagatttagaggtttatggagttattatgggtatagagaggtttatggttttgttgtgagtagatataaaggtttgtataattgttgtgggtttagtgggcggtattttaagttagggaattatttgtaggttttgaattttaatggaattttttttgttagattaaaattggttgggaatggtgatttttttattttttttaatttttttttttagaatgagaatatttattatatgtttattatattattttaaataaatttatttatttaaattttaaagttatttggaagttgataatttgtagtattataggtttatagttagagaaatttaattttaaaatgaattatgtacggggttttatttatatttgatttagatgatgagatgtaggatttttgagttaatatatagatgtaaatttggttttagtttatgttgtatgagttgagattttgggagatgttgggaggaataaatgttttttttatgtaggataaatatggattttggggtgttagagggtggattgtagtgggttgaatggtggtttttaagaagatgtttatattataatttttagagtttgtgaatattattttatatggtaaattgtgattatatgaaatattttgagataaagtgtttattttggattttttaaattggttttaaatttaatggtaagtatttttgtaagagatatatagtagagatgtgatagagaaagcggtagtaatatgatttaggggtagagatgtagttataagttaaggattgtttaaagttaatagaagttggacgttattagggatagaatttttttagagtttttagaagaggtgtgattttgtttatatttttattttagatttttggttttcggaattgggagagaataagtttttgttatttaagttattaaagttgtggtaattagttagggtaggtttaggaaattaacgtaggtagagagagtaggtttttttgtttgtgtttattgg

SEQ ID NO: 39 - DNA, 19513 bp, Artificial Sequence
  chemically treated genomic DNA (Homo sapiens)
gttgagaaaattgaggattaggttagaggcgttattgtagagaaaagttgttaaaaaggttttttagaggagttagtatttgaattaaagtagggataatatataagtattgagtacgtgttgtatgttaggttttattttaagtgttggtatatggggtaaagaataaagtagattaaatttcgtgttttaaattttgtgtttatttggggaaagagtattttaaggagatggggatgtagtatgtgcggaagtttgaagtggagaaagagttcgggttgttttacgtgatggttgtacgttggtgtggttgagagaataggggggaaggggataagggataattttggtgagattagatttttatttgggttaggaggggagggattagtagttgaagggttatagggtttaagttttttttttcgttgtcgtttttagattatgttgttagagatagttaggcgttataattacgagatagagtgtattatttttttgaaggattttatttatagtaaggacgatttttatcgtgtaggtagggtttaggggaggtttcggggaggtttggcgtttttgttggttggaagatttggggttaatttatttttgttggagtttttgtttttttatttttaaagttggggtgagggttgagttaaggtgagagtgaggtaagagtgtatgtgttacgtgtggtggtgtacgttaatagttttagttattcgaggttgaggagggtagattgtttgaggttatagtgagtcgtgattgtgcgacggtattttagtttggtgatagagaagatcgtgtttttattttttaaaaaaagtatgtattgagtgtcgattttgtatattgggttgtagtggaagttgagatgggaggagttttgttattatattaggtattttggtgggtattaggaaaagtatttttcgttttcgttaaaacgtggttttatttaagggaggcgggttggagttcggtttattgtgaagcgggtagttttttttattgtttaggggagtattgttttttgttttttgagagcgttaatttgcgtgggtgggtttttggaagaaggtttgggtagtgagaggtattgtttaggaaaagggtgggaggagtattgttagtgttgtagagtatgtattagggtttcgtttttttattgttttataatttttgggggatttttttgtatttttcgatatttgtttaaattttattttttttttttttttttatttcggtttttttattattcgagacggttttagtaatttttttagtatgagtttagtagggtagggttgtagggaagcgtttttggtagaggagattggcgattgtagaggttttgaggttggggagagttggtggtttggaggaattatagggaggtttaggtagttggagtataaggagatggggtggagaggaggtcgggaattttattttatttttttttagtcgtttttttgttattattttggaatattgttagggtttttttgaggggtcgtttgtttttatttttgtttgatggggttgtttatagtataggtagaagggttttgttagtatttaaggttgtttatttttttttttcgtttagaatttttcgcggttttcgttttattgggagaagagttagagttttttttgtggtttataaagttttttaggatttggtttcgtttattttttgtttttagtttttattttttttttttgttttagttattttggttttttattggtatttatttagtatgttgtagttaagggtttgtgtatttggagttttttttgtttagaattagggggattaattggttttagtttgtttaggatttttttagttttaatattgaaagttttatggtttgggtagttttcgttttaagttatgggaatagtagacgttggttatttttataattttttatttttttcggattggttattgttttagcgttatttagagcgtagttttttttgttcgttttgtgtaaaatagaattatggtttagtagggttttttatatttttttgtattgtttggttttattgaatttatagttttttgataggttgggtttttttttaatgtgtttgtttatgatcggttttttaggtttttaaatgtaagtgttggagtttggtacgtggtaggtatttagtgatatttgatgattgaatgaataagttagttttgggaatgagtttgggttttattttgagtagtggaagttagcgttgggattagtacgatgtgatttaggttttaaaagtttttttttgtttttgtgaaggggataagaatagggattcgggaagttgtagttatcgtttaggtgggaagggagggtggtgataggatagtagaaaatattgaagaaatatgtatttttatttatttttttattgggtagtatgtgtggtatatttattatatgttagtatttatgggtacggggtataggtggatagaaatgataagaacgttgtaattattgttgtgtttttagttttagagattgtgggtagcgttagggtttaggatgtggggtacggtttcgggttgagggagttacgggttgtttttcgtttcgtaggtttgtaggtggagtttattaattttattttcgagttttcgcgggttatgcggcggttgggtttggacgacgttgagtacgttttgtttatcgttattaatattttttcggtcgatcggtttaacgtgtaggagtcgggtcgcgtggaggcgttgtagtagttttacgtggaggcgttgttgttttatacgcgtattaagaggtcgtaggtagggtttcgtagagtttttgcgtagagttaattacgtttcgcggtttacgtggttcgtttaggttgggttttgttagttatattgttttttttttcgtagagtttttttttaggttttattttgttcgattgggagttaggtttagtttaagtatagaggcgggttttacgttggtttttacgtttggtcggggaggggtttttttttttgttggggtgggttttttaaagtttggtagggtaggggtttagttagcgtttatttgtttttttttttaggattagttgcgtttttcgcgtatgtttatgaagttggtgagtttgcgtacgttgagttttgtgtattcggagtaggttttcgttttgcggttttaggataagaagttgtcgtttttgttgtcggagatttgggacgtttacgagtgaggggttggttatttagttttatagttttgtttgattattttttagtagatagacgtcggtatttttttttttttttagggtggaaggggttttgggtcgagtttgtagatttatcggtttttattttttgggataagttttagtttaggtttaggaggttttttttttgtttagcgagttttttagaaggggtgaaagggttgtaggtttcgattattgatttttttcggttgttttttttttttagtttatattttaagtttagtacgtagtgtattttgaatagagggaggggaggatttatggtttttttttttagttcgggagattagggtttttttttttttttgtttttatttaataaaaattaaaaatagaaataggaaaataaaatatgaatataatttagttcggagttggagtgtaagatggagagggcgcgggtttttagggattttagtgatattgggtgttcgaatttgattgagtaggtgggattgggtgtttttaggttgttgggaaaagggtggtatatagggttttagtgttgggtggtgtgtcgtttgttgtgaaagtttaggatagaggttttagttttagggttatttttttggataaggtgaattagaatttatttttgaaggataaataggatttaagtgaatgaggggatttggatttttgttcgaataataagtgtttgttgaggttttttgtgggttaggtattgggttggttattttagagatggagatatttatttaataaatgtttttagagtattaattatagttaggtataattttaggtattggaaatatttgtgaataagataattatttttttattaagattcgggggatagggattttaatgagcgtggtattgtggtggggttagaggaaattagggaaggtattataatagaggtaatcgttgggatttaaaataagagtttgggggttgggtttttaagttgagggaatagtacgtgtaaagtttgaaaggagagacgttaggagttcggagcgaagcgacgaagtttttttaattttttttgtttttgtgttagttttgaaggagttgaatgagtaattttaatcgagggcgaaaggggggttggatggagggatgtaatttaaaggtgtatttatttggggcggggaatagcggaagtgagagtagttattaatgattattttattttaagagtagtgtatcgggcgttttataagtgtttttattatgcgttgttgagtttaatttacgtatagggaaattgaagttaggatgaaggagaatagattaagttaggattttatcgtttatcggttagtttttgcggggattttgggcgttaggttattagttggttgttgggtagcgacggggtagcgttttttatacggtttcgggcgagaggcgggcggggggacgcggaggatgcgcgcgtaatattcgagggtgggaggagagagaatagaatcgcggcgcgtttagatcgtacgaggtcgtgaaggtagtcgcgcggaggggcgtggtttcgggtagataggttatggggaggcggagttaagggaattttttagtaagggggcgaggttatttcggaagttgagagagggggcggggtttgttttgtagtcgaataagcggggcgtggttttgttcgtatttgggtaggcgggggcgtggttcgtttttgagcgtcgcggttttgggtttgcgcgcgcgggagttaggggttacggcggcgtaggttgtggcgggaaacgttgtttgaagcgggtgagtagaggggaaaaagggagttcggggtagtgggtttggtagggaacggggtttgagtagttaggtatatagatttgagagacggttgcgagggtattttttggttcgggggcgcgtaggagagggtaggggttaggggttttttgggcgagggcgcggggacgagtaggaaaaggtcggggtgggggtggaatttttcggcgggtagggggcgtatgcgtcgggtatcgtggggcgggacgtggttcgggaggagttggggggattgggtggtgtacgtgcgggtttggtgttattttggattcgttgggtgtttgagtattttgtgttaggtatttttttggaagtaggaataagttagagaagtttttgtttcgggaagatagacggtagataagtgatgagttttaatagattagtaaagtagtgttttggggttgtgagatgtttttagaaggaaattaacgtagggtaacgtgataatgagcgaagagtttgttgttttagttggagtggtttagaatcgatcgttttgggatttttaagtgtaaagttttgaggtggaaggagtttggcgtatttgtagtaggagtcgaggggacgagagaaatatagatgaggtcggagttatgatggggaattagattttatagggttttgtaaaatttggtatggaattttttttttattttaggtttagcggggagtcgtgggagggtttgagcgtggaaataatacgattcgttttatgttttgaaaaatttattattgagtggaaattggattgtagtaggaataagaatggaaggagggagatttgttaggagggagagcgttttgtaggtagagaattaggtttcggttatttttgcgggcggagatagggggattggttgatggattgggcgtaggagtaaggggaagagtttaggatgatttttgggtttgtggtttgagtagtaggttggatggggaaggttaagggagaagtaggttggggttgtcgttttgaaggtaaagattagtgggggagtgagtgggtagggtttagagcggagttaggagtgggtagggcgatgttagtgtttcgttttagtttttttattgaaggaatttgttgttattgtttttttttttttttttttttttttttgagatagagttttgttttgttatttaggttggaatgtagtggtgtaaatttagtttattgtaattttcgtttttcgagtttaggcgagtttcgtgttttagttttttgagtagttgggattacggtatttattgttatgtttagtttattttttgtatttttagtagagatggggtttcgtcgtgttggttaggttggtttcgaatttttgattttaggtgatttatttgtttcggttttttaaagtgttgggattataggcgtgagttattacgtacggtcgtttttttttttttttgtattttttttttataggttttttttttttttagagaggttttttttttttttttgaaatgttttttttttttttatgtgtttttgatagttgttgtttggataggttttttgttgagtattggggagttaatgattatttagtttggttggggaaggataggagattttagtttagagtgcgttgagttatggcggagtagtgatagtttttgggagttaagagaagaatttgtgcgtttagggaagatttattagagtggttgatatttatagggagttttaatttatatgtttttttttttttggtttttgagatagggttttgttttgtcgtttaggttggagtgtagtggcgcgatttcggtttattaatttttatttttcgggtttaagcgatttttatgttttaggttttcgagtagttgggattataggtgtgtgttattacgtttagttaatttttgtatttttagtagagatagggttttgttatgttgtttagattggtttcgaatttttgattttaagtaatttttttatttcggttttttaaagtgttgggattataggtgtgagttattatattcggtttaaatttatgttttgaagtaatcggatattgtgtagagtgatgttggagattttaatttgggtaagatgttgatttttttttttaaggagtttataggttgaaaggattttagttttgtattgtgtaataacgaaagtggtataaggcgttgtgggaattttgaagggtagttggttagtttggaggagttaagtttgagttgagtttttggatgtagtggagttttatgtagcgaatattgtttaaggttttttgggggtttattttgtgttgggtgatgttaaggttttagaggagagttagtttttgttttgttatttagaggtttttggttggtaagggaggaagatatatatttaggtagtttagagatagtagttatagaggtttaggggaaggataaggtcgaaagtatgtaggtgagtttgggtaatatagtaagattttggtttttataaaaaatataaaagttaggtcgggcgcggtggttaaggtttgtaattttagtattttgggaggtcgaggcgggtagattatgaggttaggagattaagattattttggttaatacggtgaaatttcgtttttattaaaaatataaaaaattagtcgggcgtggtggtgggcgtttgtaattttagtattttgggaggtcgaggtggacggattatttgaggtgaggagtttgagattagtttggtagatatggtgaaattttattaaaaatatataattagttggatatggtgggcgtttgtaattttagttatttgcgaggttgaggtaggagaattatttgagtttaggaggcggaggttgtagtgagtaagatttttttttaaaaaaatatataaataaaaataaagttgtgagattgggtaagattggatgaggttattgaggaaatgagtgttttatttatcgagaaaattggtgtttggtttgtagcgagtacgtggtgttattttgttgttgaatttttgttaagtgtttgttatcgaagggtcgtgagaggggtagaggatagtgtttgttaagtttttattttgtgttagggttaatgagaggggatatataggggttttttttttttaatgttgttgtgtttttattaataagagtttaggttttgtttttggtgatatcgttttttttatcgtattttcgtagttatagttaattgattaagggtagttagttagttttttttttttttttttagttttagtattgattttgggtttttataagtttttgcgttttttttgttttattcgggttttttttcgtagattattattttttgtttttttttggttatttgtataattcgaagttagagtcgttaacgacgtttgtttttttttgtaagttatatatgtacgcggttgttatttaaagagtataaacgtagttaaagttttttttatataaaattttttgtatacgtttacggttgtattatttataaaaggtggaagtaattttaatgtttatttattgatgaagggatacgttagacgtgttttagttatatagcggaaaagtatttagtaaaaaagggatatagtattgacgaaaggtcgttatatatatgagcgatgaatatatttagagaaagtagttagatataagaggttgtatattttaagattttatttataggaaatgtttagaataggtagatttatggagatagaaagttagatgagtggttgttaggggtgggggtagatgggttgaatgtagggagagagttaaaggatttaggttttttggggtgatgagagagttttaaaattgattgtggtgatggttgtttaattttgaatatattaaatattattgaattatatatattttaaatgggtgaattgtatagtatgtgaattatagtttaataaagtagttagtaaatgaagttttttattttgttttttaggaaattagttttttagttttttttatagaatgatgtattaaaagtaaatagatttatatatatgttttgtattataataaaaaagacgtttatatattttttgtattataataaaaaagacgtttatatattttttgtattaaaagtaaaaagatttttatatatttttttgtttattttgtaaatttgttattatttttattttatatattttttttttaatattttgaaaagttttaaatttgtagagaaggtataaattgagtatagtgaatagttatggttttttgtttagatttattggttgttggtatgatattttatttgttttatgttttatttaagtatatgtatatatttgtattttttgttttttttttggttgaattatttgaaagttgtggttattatgatattttatttttgaaaattttagtagttaattttttttttttttttttttttttttttgagacggagttttgttttgttatttaggttggagtatagtggtgcgattttggtttattgtaatttttgttttttaggtttaagcgatttttttattgtagttttttgagtagttgggattataggcgcgtattattatatttggttaatttttgtatttttagtaaagatggggttttattatttttgttaggttgtttttgaatttttgattttatgatttacgtgtttttgttttttagagtgttgggattataggtatgagttatcgtatttggtttttttttttttttttggtatagtattttattttgttatgtaggttgtagtgtagtggggtggttatagtttattgtagtttcgatttttttaggtttagttgatttttagtttttcgagtagttgggattaaaggtgtgtgttattatattttgttaatttttatattgtttatagagatagggtgttattatgttgtttaggttgattttaaatttttgggtttaagtaatttttttgtttcggtttttaaatgttttgggattatagtcgtgagttatcgtatttggtttttagtagttagtttttaagaatagggatgttcgtttgtagaattatagtgttattgttattattatgtagtttaatatgagatagtgacgttattgaatagacgatttttatttagatttgttacgtgtttttgtaatattttttaaggttataaataattttttattttttttttttttttaagattgagttttgttttatcgtttaggttggagtgtagtggtattatttcggtttattgtaatttttgttttttgggtttaagttatttttttgttttagtttttcgaatagttggaattataggtatgtattattacgttcggttaatttttttgtattttttgtagagacggggttttattttggttaggttggtttcgaatttttgattttaggtgattcgttcgttttgggtttttaaagtgttaggattataggcgtgagttattatgtttagtttgtttttttttttgttttttgttttgtttttttttttttttttgaaatagagttttattgttatttaggttggagtgtagtggtgcgattttggtttattgtaatttttattttttaggtttaattaatttttttgttttagtttttcgagtagttaggattataggcgtttggtattacgtttagttaatttttatatttttagtagagatagggttttattatgttggttaggttggttttaaatttttgattttaggtaatttatttattttagttttttatagtgttgggattataggtgtgagttattgcgtttggttaataatttttttttttttttttttttttttttttttttttaagttatatgaagtaaatttattatttatagttaggtaataagggaaaatcgaagtataggatttattgtgagttaatttttcgagatttaggaaggttgtttcgggaggatggagttttatttgtgtgtattttatttgtatttggaaagtagattattttgggttttatattttggaggtaatatgatatgttgggttaaaatgatgaaggatattttgtttttaggagggattggaatagagtttgggttgttttagttagtttttttttattttaggatattgtatttttagtatattttatagttatttttgagaattattttttttttttttttagtatttattgattatttttgggtgttttttggagagggggatttggtagggttataggataatagtggagggaaggttagtagataaataagtgaataaaagtttttggtttttttaggtagagggttttgcggtttttcgtagtgtttgtgtttttgggtatttgagattagggagtggtgatgatttttaaggagtatgttgtttttaagtatttgtttaataaagtatattttgtatcgtttttaatttatttaattttgagtggatatagtatatgttttagagagtacggggttgggggtaaggtcgtagattaatagtattttaaggtagaattttttttagtatagaataaaatggagttttttatgtttatttttttttatatagatatagtaataatttgatttttttttttttttttattttttttttttttattcgataaaatcgttatcgttattatggttcgtttttaatgagttgttgggtatattttttagacggggtggcggttaggtagaggcgttttttatattttagacggggcgtcggggtagaggcgttttttatattttagacgatgagtagtcgggtagagacgttttttattttttagacgggatggcggttgggaagaggcgttttttattttttagattgggcggttaggtagagatgttttttattttttagacggggtggcggtcgggtagaggttgtaatttcggtattttgggaggttaaggtaggcggttgggaggtggaggttgtagcgagtcgagattacgttattgtattttagtttgggtattattgagtattgagtgagcgagatttcgtttgtaatttcggtatttcgggaggtttaggcgggtagattattcgcggttaggagttggagattagttcggttaatacggcgaaatttcgtttttattaaaaaatataaaaattagttaggtatggcggtgcgtgtttgtaattttaggtatttagtaggttgaggtaggagaattaggtagggaggttgtcgtgagtcgagatggcggtagtatagtttagttttagttcggtattagagggagattgagaggggggagggggagggggagggagagggagaggttttttttttttttattttttcgtttttgttgttcgggttggagtgtaatggcgtaattttggtttattgtaattttcgttttttaggtttaagcgatttttttgttttagttttttaagtagttgggattataggcgttcgttattatgataagttaatttttgtattttttttagtatagacggggtttttattacgttggttaggttggttttaattttttgattttaggtgatcggtttgttttagttttttaaagtgttaggattataggcgtgagttattgtatttggtttattattttatttttttaatttaagttttaatttaggataatatatattgttatggtaatttttttattttttaagatatgttttgtttttttgtttagattgtattgtagtggtgtagttatggtttattgtagtttttattttttaggtttaagtgatttttttattttagttttttaagtagttgggattgtaggtatgtattattatgtttaagtaatttttaattttttgtagagattgattaatttttaattttttgtagaaatggagttttattatgttgtttaggttagtttttaatttttggttttaagtgattattttattttagttttttaaagtgttgggattatagacgtgagttttttagtttaggtaatttatttttttatgatatcgatagttttaaagattatagattagtgttgttattttttattttggattcgtttgttttttttttttgttttgttttgagatagagttttgttttgttatttaggttggagtgtagtggcgtgatcgtagtttattgtaatttttgttttttaggtttaagtgatttttttgttttagttttttaagtagttggtattataggtatttattattacgtttggttaatttttgtattttagtagagatggggttttattatgttggttaggttggtttggaatttttgattttaagtgatttattttttttggttttttaaaatgttgggattataggcgtgagttattgtatttaggttgtttgttttttaatgattagaattagggtaaacgtttttttagatattgttttttaatataaaagataaaattgtgagtgtattattgtgtattttgttttatttattgaataatgtttttttgagaattttttttattagtatataaagagtttttttatttttttatatagttgtatagtattttattgaacggatttaatatatttaaatagttttttgggggaggatagttaggtggtttttagtttttggggattttaaacgatgttttcggaaataattttataaatgtagttttttttatgtgataatatatttatagtgtacgtttttagatgtggaattgagtttttaaatttttatgtttataattgaggtggtatttatatggcgtgttatgtttaggtttttagtgtatagttagttgtatagtgtgttttattattttagaaatttttttatattttttttagttttttttattttaggagtagttattagtttgatttttagcgttgtagattattttagtgtattttataattttgtttaaatggtattgtataatttttatggaggtaaaattagttattttaaagtaaataatggttgggcgtggtggtttatatttgtaattttagtattttggggaggttaaggtaggtagattatttgagtttaggggttttagattagttttagtaatatggtaaaattcgtttttattaaaaaataattggttaggtatggtggtacgtatttgtttttataattatttaggaggttaaggtgggaggattatttgagttcgggaggttaaggttgtagtgagttgagattatgttattgtattttagtttgggtaatagagtgagattttgttttaataaagagagaaagtaataataaagtaaagaatttagttggtacgtttatagtgttgtataattattatttttgtttagttttaaaatattttattatttttatagaaaattttatatttcgtaagtagttattttttatttttttagtgtgtattttgttttttgtatagtttgtttttaagatttattcgtgttgtatgtttgttaggagttggtttttttttaatgttgagtgtttgttatgaatttttttgaatatttttaatatatattttattagtttagaatttttttatgtttattttaggtttaagttgttgtattaaggagtttttaaaatatagtggtttaagaaagatataaattgatttttttatataacgttttggaagataggtaagtgtgtagggttggtagatagttttgttttggaaggttgttggggagtttagtgttgtttttgtttttgtggttggtttttttattatatttatgttttagttattgtgacggggaagagggtgggaggatgttttagtagttgtatattttatgattatttttatttttggagggagaatttagttacgtggtttttttggtagcgtatattgggaaatgtagtttttggttgggtagtttgtggttatttcggatacgtagggttggaggggtgtgttttattgtaaaaaagtaaagtaaagtcgggcgcggtggtttatatttataattttagtattttgggaggtcgaggcgggcggattatttgaggttaggagttttatattagtttggttaatatggtgaaattttatttttattaaaaatataaaaaaaaattagcgggtatgatggtggacgtttgtaattttagttattcgggaggttgaggtaggagaatcgtttgaagttaggaggcgaaggttgtagtgagtcgagattagttattgtattttagtttgtgtgatcgagtgagatttcgtttaaaaaaaaaataagtaaaataaaaaggtaaaatgaggattggatatggggtaatcgttatgagatttagggatagatagttgatttgtttatttgtttttttttagtcgtatttaggatttgttttaggttttagtaattttttttgttttagtttggattttgggggataagtattttgtttttgtttgtttgttttttgagatagaattttatttttgttgtttaggttggagtgtaatggcgtagttttggtttattgtaatttttattttttaggtttaagggatttttttgttttagttttttaagtagttggggttttaggtgtgcgttattatgtttagttaattttttttttttttttttttagtagagatagggttttattatgttgataaggttggttttaaataattgattttaagtgatttattcgtttcggttttttaaagtgttgggattataggtgcgagttacggtgtttagttgggtataggtattttttaaaaatttttttttttgataattttaaattaataggaaggttgaaagaataaatagtgtaggtcgggcgcggtggttgggtataggtattttttaaaaatttttttttttgataattttaaattaataggaaggttgaaagaataaatagtgtaggtcgggcgcggtggtttatatttataattttagtatttcgggaggtcgaggcgggcggattacgaggttaggagattgagattatagtgaaatttcgtttttattaaaaatataaaaaaattaggcgggcgtagtggcggacgtttgtagttttagttatttaggaggttgaggcgggagaatggcgtgaattcgggaggcggagtttgtagtgagtcgagatcgcgttatcgtattttagtttgggagatagagcgagatttcgtttttaaaaaaaaaaaaaaatagtgtaaagaatatttgtacgttttttgtttagattatttgttttaatattttgttttatttatgatttgtatggatgttttttattttttttttttttgtatacgtatatttattttttataaagaatttttaatattttgtagatattatggtcgtttatttttaaatatttgagtgtgtatttttttagaatatttttattgaattataataaagttatttatttaagtttaatttgtatataattttgtttaattaattagaggatatatatttttttttttttttttttttttttgagatagggtattgttattttgtttagtttagttttaaatttttgggtttaagcgatttttttattttggttttttaaagtgttgagattataggtataagttattatgtttagtgaatttttttgttgtggttgtttttttgtttgtttgtttgggttttaattgttgttgttggtggtggtttttttttgtttttttttttgagatagaatattgttgtgttgtttaggttaaagtgtagtggcgcgatttcggtttattgtaatttttatttttcgggtttaagtgatttttttgtttcggtttttcgagtagttataattataggtgtgtatcgttatatttagttaatttttttgtatttttattaaagatagggttttattatgttgattaggttggtttcgaatttttgattttaagtgatttattcgttttagttttttaaagtgttgggattatagcgtgggttatcgtgtttaattttagttaatttttatattgtatattttgtatattgtatattttgttaaggatattgtatattttgttaaaatatatttttaaaataataatatatatatatattttttgagatggagtttcgttttgttgtttaggttggagtgtagtggtgtaattttagtttattgtatgttttgttttttgggtttatattatttttttgttttagttttatgagtagttgggattataggcgtttattattatgttcggttaatttttttgtatttttttagtagagacggggttttattatgttagttaggatggtttcgattttttgattttatgatttatttgttttttaaagtgttgggattataggtgtgagttattgtttttagtttttaaaataattttttataggttgtaattaagaaaatataggttaggtttggtggtttacgtttgtaattttagtattttgggaggtcgaggtaggtggattatttgaggttaggagtttaagattaggatggttaatatggcgaaattttgtttttattaaaatataaaaattagttaggtatggtggtgggtatttgtgattttagttatttaggaggttgaggtaggagaattttttgaatttgggaggcggaggttgtagttaagatcgtattattgtattttagtttgggtgatagagcgagattttattttaaaaaaaaaaaaaaaaagaaaatataggttaggtttggtggtttacgtttgaaattttagtattttgggaggttaaggtaggtggattatttgaggttaggagtttaagattagtttggttaatatggtgaaatttcgtttttattaaaaatataaaaattagttgggtatggtggcgcgtgtttgtaattttagttatttgggaggttgaggtagaagaattgtttgaattgggtttcgggaagcggaagttgtagtgaatcgagattgtgttattgtattttagtttgggtaataagagtgagattttgtttttttttttttttttttttgagacggagttttgttttgtggtttaggatggagtataatggtacgatttcggtttattgtaattttcgttttttaggtttaagtaatttttttgttttagttttttgagtagttgggattataggcgtttgttattttatttggttaatttttgtatttttagtggagatggggttttattatgttggttaggttggtttcgaatttttgatttcgtgattcgtttattttggttttttaaagtgttgggattataggcgtgagttattatattcggttttgattatgtttttaaaagaaagaaaaagaaaatataaatatatataagtagtagtttgtatgtgttttgtgttgtgttttgtttgttattgtgggttttggattcggggagaaagtaggttattataaacggtattttggagatagttggagaaattgggaaaggtgttttttattttatattaattttgagttagtgttaaatgttttagattgtatcgtattgtgttcggtgaaaggaattttttattgttaggtattacgtgttaatatgtggaggggtatgggatttgtaaggaatttttaaattatttaggaaaagaagtaataatatgatgtgtatatcgtatatgtgggagggtagagagaggcggtgagagagtatatatacgatacgttgattatcggggagtttggggaagggtatataggagttttaggtatttgagattattttaaagtatttaggttggtgtaaaagtaattgtagtttttgttattttaatggtagatggtttgggtagatgggtggttggtaggcgaggtatcggagatagaggtttatggaaaataaagagatgtgttaaggtcgggcgcggagatttaggtttgtaattttagtattttgggaggttgaggcgagtggattatttgaggttaggagttcgagattagtttggttaatatggtaaaatttcgtttttatttaaaatataaaaattagttgggtgtggtggtgggcgtttgtaattttagttattcgggaggttgaggggagaatcgtttgaatttgggaggtagagtttgtagtgagtcgagattatgttattgtattttagtttgggtgataagagtataattttattttaaaaaaaaaaaaaaaaaaaaaagtaagagatgtgttaaggatttagtgtgatgggagagagggtcggggagtcgacggggttgttgttgtagtagttaataattgagcgtttggaatgtgtttttattttattgtttgtagggtgtagagagttatgttagtatagttagtttagagtaggaaaaggttcgtggttatggtgggtgtatgggatgttatggagatagggtaagaggtgttttcggttagaatttttattaagttttaatttgtttagtagg

SEQ ID NO: 40 - DNA, 19513 bp, Artificial Sequence
  chemically treated genomic DNA (Homo sapiens)
tttgttgggtaagttggagtttggtggaggttttgatcggagatattttttattttgtttttatggtattttatgtatttattatgattacgagtttttttttattttggattggttgtattaatatagttttttgtattttgtaggtagtggggtgggagtatattttagacgtttaattgttagttattgtagtagtagtttcgtcgatttttcgatttttttttttattatattaggtttttagtatattttttgtttttttttttttttttttttttgagatggaattgtgtttttgttatttaggttggagtgtaatggtatgatttcggtttattgtaagttttattttttaggtttaagcgattttttttttagtttttcgagtagttgggattataggcgtttattattatatttagttaatttttgtgttttgagtagagacggggttttgttatgttggttaggttggtttcgaatttttgattttaggtgatttattcgttttagttttttaaagtgttgagattataggtttgagttttcgcgttcggttttggtatatttttttattttttataaatttttgttttcgatatttcgtttattaattatttatttgtttaggttatttgttattgaaatgataaaaattgtaattatttttgtattaatttaaatattttgaaataattttaaatgtttagaatttttgtatgtttttttttaggtttttcggtggttagcgtgtcgtgtgtgtgtttttttatcgtttttttttgtttttttatatgtgcggtatgtatattatattgttatttttttttttgagtaatttgagagttttttgtagattttatatttttttatatgttagtacgtagtgtttaataataaggaattttttttatcgagtatagtacgatataatttaggatatttaatattgatttaaggttgatataaaataaagggtattttttttaatttttttaattgtttttaaaatgtcgtttatagtaatttgtttttttttcgagtttaggatttatagtagtaaataaaatataatataaaatatatatagattgttatttatatatatttgtgtttttttttttttttttttaaagatataattagggtcgggtgtgatggtttacgtttgtaattttagtattttgggaggttaaggtgggcggattacgaggttaggagttcgagattagtttgattaatatggtgaaattttatttttattaaaaatataaaaattagttaggtgaggtagtaggcgtttgtaattttagttatttaggaggttgagataggagaattgtttgaatttgggaggcggaggttgtagtgagtcgagatcgtgttattgtattttattttgggttatagagtaagatttcgttttagaaaaaaaaaaaaaaaaagatagaattttatttttgttgtttaggttggagtatagtggtataatttcgatttattgtaattttcgtttttcgggatttagtttaagtaatttttttgttttagttttttaagtagttgggattataagtacgcgttattatgtttagttaatttttgtatttttagtagagacggggttttattatgttggttaggttggttttgaatttttgattttaagtgatttatttgttttggttttttaaagtgttgagattttaggcgtgagttattaagtttggtttgtgttttttttttttttttttttttgagatggagtttcgttttgttatttaggttggagtgtagtggtgcgattttggttgtaattttcgttttttagatttaagagatttttttgttttagttttttgagtagttgggattataggtgtttattattatgtttggttaatttttgtattttagtagagatagggtttcgttatgttggttattttggttttgaatttttgattttaggtgatttatttgtttcggttttttaaagtgttgggattataggcgtaagttattaagtttggtttgtgtttttttaattataatttataaaagattattttggaggttgggagtagtggtttatatttgtaattttagtattttaggaggtaggtgaattatgaggttaggagatcgagattattttggttaatatggtgaaatttcgtttttattaaaaaaatataaaaaaattagtcgggtatggtggtgggcgtttgtagttttagttatttatgaggttgaggtaggagaatggtgtgaatttaggaggtagagtatgtagtgagttgagattgtattattgtattttagtttgggtaatagagcgagattttattttaaaaaatatatatatatattattattttgggggtgtattttgataagatatataatatttttgataagatatataatgtataagatatataatataaaagttgattagagttaggtacggtggtttacgttgtaattttagtattttgggaagttgaggcgggtggattatttgaggttaggagttcgagattagtttggttaatatggtgaaattttatttttaataaaaatataaaaaaattagttgggtgtggcggtatatatttgtaattatggttattcgggaggtcgaggtaggagaattatttgaattcgagaggtggaggttgtagtgagtcgagatcgcgttattgtattttagtttgggtaatatagtaatattttgttttaaaaaaaaaaataaaaaaaaattattattaataataataattaaaatttaaataaataaataaaaaaataattataataaaaaagtttattgggtatagtggtttatgtttgtaattttagtattttgggaggttaaggtgggaggatcgtttgagtttaggagtttaagattggattggataagatggtaatattttgttttaaaaaaaaaaaaaaaaaaaaaaaagtatatattttttggttgattagataaggttatatgtaggttaaatttaagtgggtgattttattgtggtttaataagaatattttaaggagatatatatttaagtatttaggagtaaacggttataatgtttgtaaggtattgggaattttttgtaaaaagtgagtgtacgtatatagagagaagggagataagaaatatttatgtaaattataaataggatagaatgttgaaataggtgatttgggtaaagggcgtgtaggtgttttttatattatttttttttttttttggagacggagtttcgttttgttttttaggttggagtgcggtggcgcgatttcggtttattgtaagtttcgtttttcgggtttacgttattttttcgttttagttttttgagtagttgggattataggcgttcgttattgcgttcgtttaatttttttgtatttttagtagagacggggttttattgtggttttaattttttgatttcgtgattcgttcgtttcggtttttcgaagtgttgggattataggtgtgagttatcgcgttcggtttatattatttatttttttaatttttttgttaatttgaaattgttagagaaagaagtttttaaaaagtatttgtatttagttatcgcgttcggtttatattatttatttttttaatttttttgttaatttgaaattgttagagaaagaagtttttaaaaagtatttgtatttagttgggtatcgtggttcgtatttataattttagtattttgagaggtcgaggcgggtggattatttgaggttagttgtttgagattagttttattaatatggtgaaattttgtttttattaaaaaaaaaaaaaaaaaaaattagttgggtatggtggcgtatatttggaattttagttatttgggaggttgaggtaggagaattttttgaatttgggaggtagaggttgtagtgagttaagattgcgttattgtattttagtttgggtaataagggtgaaattttgttttaaaaaataaataaataaaaataaagtatttgttttttagggtttaggttgagatagaggggattattggaatttagggtagattttagatgcggttgggaagaggtaggtgagtaggttagttgtttatttttggattttataacggttgttttatatttagtttttattttgtttttttattttatttattttttttttagacggagttttattcggttatataggttggaatgtagtggttgatttcggtttattgtaattttcgttttttggttttaagcgatttttttgttttagtttttcgagtagttgggattataggcgtttattattatattcgttaatttttttttgtatttttagtagagatggggttttattatgttggttaggttggtgtggaatttttgattttagatgattcgttcgtttcggttttttaaagtgttgggattatgggtgtgagttatcgcgttcggttttgttttgtttttttgtaatagaatatatttttttaattttgcgtgttcggagtggttataggttgtttagttaaaggttatattttttagtgtgcgttgttaggagggttacgtgattaagttttttttttaggaatgagagtgattatgaggtgtgtagttattgggatatttttttattttttttttcgttatagtggttggaatatggatgtagtgggagagttaattataaggatagggataatattgggttttttaataattttttagagtaaagttgtttgttaattttgtatatttgtttattttttaaagcgttatgtggagaaattaatttgtattttttttgggttattgtgttttgggggttttttggtataatagtttagatttgaaataagtatggaaaaattttgaattgatggagtatatgttagaaatgtttagggaggtttataatagatatttagtattagagaggggttagtttttgatagatatgtaatacggatgaattttgaaagtaggttgtgtagaaggtaaagtgtatattgggggaatgaggagtgattgtttacggagtatggggttttttgtaggggtgatgaaatgttttgaaattagatagaggtaatggttgtataatattgtgaacgtattaattgaattttttgttttattattattttttttttttattgagataggattttattttgttgtttaggttagagtgtagtggtatgattttagtttattgtagttttgatttttcgggtttaggtgatttttttattttggttttttgagtagttatgaagatagatgcgtgttattatgtttagttaattgttttttggtaaagacgggttttgttatgttgttgaggttggtttgaaatttttgggtttaagtgatttgtttgttttggtttttttaaagtgttgggattataggtatgaattattacgtttagttattgtttgttttaaaatggttaattttatttttataaaaattgtataatattatttagataaagttgtagaatatattaaagtgatttatagcgttagaaattagattagtggttgtttttagggtaggagagattgggaagggtatgagggggtttttggggtgataaaatatattatatagttgattgtatattggagatttgggtatggtacgttatgtaaatgttattttaattataaatataaaagtttggaggtttaattttatatttagggacgtatattgtagatatattattatataagaaaaattgtatttataaggttattttcggaagtatcgtttgaaatttttaaggattggaaattatttaattgtttttttttagggggttatttaaatatgttaagttcgtttaatggaatattatgtaattgtgtaaaggaatgaggaagttttttgtgtattgatagggaaggtttttaaagaggtattgtttagtagataaagtaagatgtatagtggtgtatttataattttattttttgtgttgaaaaataatgtttaagaaaacgtttattttgattttagttattaagaaataaatagtttgggtgtagtggtttacgtttgtaattttagtattttgggaggttaaggagggtggattatttgaggttaagagttttagattagtttgattaatatggtgaaattttatttttattaaaatataaaaattagttaggcgtggtggtgggtgtttgtaatattagttatttgggaggttgaggtaggagaattatttgaatttgggaggtagaggttgtagtgagttgcgattacgttattgtattttagtttgggtgatagagtaagattttgttttaaaataaaataagaaaaagaaataaacgaatttaaggtgaggggtgataatattggtttgtaatttttaaaattgtcgatgttatgaaaaagtaagttgtttgggttaggaggtttacgtttgtaattttaatattttgggaggttgaggtgggatgattatttgaggttaggagttagaaattagtttaggtaatatggtgagattttatttttataaaaaattaaaaattagttaatttttataaaaaattaaaaattatttaagtatggtggtgtatatttatagttttagttatttgggagattgaggtgggaggattatttgaatttgggaggtgaaggttgtagtgagttatgattgtattattgtaatatagtttgggtaagagagtaagatatgttttaaaaaatgaaaaagttgttatgataatgtgtgttattttaggttagaatttggattaaaaaagtaaaatgatgggttaggtgtagtggtttacgtttgtaattttagtattttgggaggttgaggtaggtcgattatttgaggttaggagattaagattagtttggttaacgtggtgaaaatttcgtttatattaaaaaaaatataaaaattagtttgttatggtggcgggcgtttataattttagttatttgggaggttgaggtaggagaatcgtttgaatttgggaggcggaggttgtagtgagttaagattgcgttattgtattttagttcgggtaataagagcgggggagtgggaaaaaaaaagatttttttttttttttttttttttttttttttttttttagtttttttttgatgtcgagttgaggttggattgtgttgtcgttatttcggtttacggtaatttttttgtttgatttttttgttttagtttgttgagtgtttgggattgtaggtacgtatcgttatgtttgattggtttttgtattttttggtggagacggggtttcgtcgtgttggtcgggttggtttttagtttttgatcgcgagtgatttgttcgtttgggtttttcgaggtgtcgggattgtagacggagtttcgtttatttagtgtttaatggtgtttaggttggagtgtagtggcgtgatttcggttcgttataatttttattttttagtcgtttgttttggttttttaaagtgtcgagattgtagtttttgttcggtcgttatttcgtttgggaagtgaggagtatttttgtttggtcgtttagtttgggaagtgaggagcgtttttttttagtcgttatttcgtttaggaagtgaggagcgtttttgttcggttgtttatcgtttgagatgtggggagcgtttttgtttcgacgtttcgtttgggatgtgaggagcgtttttgtttggtcgttatttcgtttgggaggtgtatttagtagtttattgagaacgggttatgatgacgatggcggttttgtcgaatagaaaagggggaaatgggaaaggaaagagagattagattgttgttgtgtttgtgtagaaagaagtagatataggagattttattttgttttgtattaagaaaaattttgttttgggatgttgttaatttacggttttatttttaatttcgtgttttttgaaatatgtgttgtgtttatttagggttaaatggattaagggcggtgtaagatgtgttttgttaaatagatgtttgaaggtagtatgttttttaagagttattattattttttaattttaagtatttagggatataaatattgcggaaggtcgtagggttttttgtttaggaaaattagagatttttgtttatttgtttatttgttgattttttttttattattgttttatgattttgttaaatttttttttttaagaaatatttaagaatgattaataaatattaaaaaaaaaaaaaaaatagtttttaagaataattgtagaatgtgttaggaatgtaatattttgagataaggagggattggttgaaatagtttaggttttgttttagttttttttagaaataggatgttttttattattttagtttaatatgttatgttgtttttagaatataaaatttaagatggtttgttttttaggtataaatggggtatatataaatgagattttattttttcggggtaatttttttgagtttcgggagattggtttataatgaattttatgtttcggtttttttttgttgtttagttgtaaataataaatttattttatgtaatttgaaaaaaaaaaaagaaaagaaaagaaaaaaagaaattattggttaggcgtagtggtttatatttgtaattttaatattatgagaggttgaggtgggtggattatttgaggttaagagtttgagattagtttggttaatatggtgaaattttgtttttattaaaaatataaaaattagttgggcgtggtgttaggcgtttgtaattttagttattcgggaggttgaggtaggagaattgattgaatttgggaggtggaggttgtagtgagttaagatcgtattattgtattttagtttgggtgataatgaggttttgttttaaaaaagaaaaaaaaaataaaataaaaaataaaaaaaaaaataggttggatatggtggtttacgtttgtaattttagtattttgggagtttaaggcgggcggattatttgaggttaggggttcgagattagtttggttaaaatgaaatttcgtttttataaaaaatataaaaaaattagtcgggcgtggtggtgtatgtttgtaattttagttattcgggaggttgaggtaagagaatggtttgaatttaggaggtagaggttgtagtgagtcgagatagtgttattgtattttagtttgggcgatagagtaagatttagttttggaaaaaaaaaaaaaataagaaattatttatagttttgaagaatattatagggatacgtggtagatttaaataagaatcgtttatttaataacgttattgttttatgttaaattgtatgatgatgataatgatattgtagttttgtaggcggatatttttgtttttaagagttgattgttggaggttaggtacggtggtttacggttgtaattttaggatatttggaggtcgaggtagggggattgtttgaatttaggagtttgagattagtttaggtaatatggtgatattttgtttttataaataatataaaaattagtagggtgtggtggtatatatttttagttttagttattcgagaggttgaggattagttgagtttggggaggtcgaggttgtagtgagttgtgattattttattgtattataatttgtatgatagagtaaaatattgtattaaaaaaaaaaaaagaggttaggtgcggtggtttatgtttgtaattttagtattttgggaggtagaggtacgtagattataaggttaggagtttaagagtagtttggtaaagatggtgaaattttatttttattaaaaatataaaaattagttagatgtggtggtgcgcgtttatagttttagttatttaggaagttgtaataggagaatcgtttgaatttgggaggtagaggttgtagtgagttaaggtcgtattattgtattttagtttgggtgatagagtaagatttcgttttaaaaaaaaaaaaaaaaaaaaaaaaagagttaattgttggagtttttagaggtgaagtattatgatgattataatttttaaatagtttagttaaaaaaaggataaaaggtataggtatatgtatgtgtttggataaagtataaagtaaatgaggtgttatgttaatagttagtgaatttaggtaaagggttatggttgtttattgtatttaatttgtattttttttgtaggtttgaaattttttaaaatattaagggggaaatatataaaatgaaaatagtaataaatttataaggtgggtagaagagtatgtagaaatttttttgtttttaatgtagggagtatgtagacgttttttttattgtaatgtagggagtatgtagacgttttttttattgtaatgtagggtatatgtataaatttatttgtttttaatgtattattttataaggagagttaagaaattggttttttgggggatagggtagaagattttatttgttaattgttttattgagttataatttatatattatataatttatttatttaaagtatatatagtttaatggtatttagtatgtttagagttaggtaattattattatagttaattttagaatttttttattattttaaaaagtttaaattttttagttttttttttgtatttagtttatttgtttttatttttggtagttatttatttaattttttgtttttatggatttgtttattttgggtattttttataaatgggattttggaatatgtagttttttgtgtttggttgttttttttgaatgtgtttatcgtttatgtgtgtggcggtttttcgttagtgttgtgttttttttttgttgagtattttttcgttgtatggttagaatacgtttgacgtatttttttattagtggatggatattagggttgtttttattttttgtgagtggtgtagtcgtgagcgtgtgtagggggttttgtgtgaggaagattttgattgcgtttgtgttttttgggtgataatcgcgtatatgtgtgatttataggaagaagtaagcgtcgttagcggttttggtttcgggttgtgtaagtagttagagagggatagggagtgatgatttgcgaggagagattcgggtgggatagaggaagcgtaggggtttgtgggagtttagagttagtgttgaagttggaggaggaaggaaggagttgattggttgtttttggttagttggttgtggttgcgggggtgcggtgggagggacggtgttattaggggtaaaatttgggtttttgttagtggaggtatagtagtattaggaaggaaaggtttttgtgtgtttttttttattggttttggtataggatgagagtttggtaaatattgttttttgttttttttacgatttttcggtagtaagtatttaatagagatttagtaataaaatgatattacgtgttcgttgtaggttagatattagttttttcgatgagtgagatatttatttttttaatgattttatttaattttgtttaattttatagttttatttttatttatatatttttttgggaaaggattttgtttattgtaattttcgttttttggatttaagtgatttttttgttttagtttcgtaggtagttgggattataggcgtttattatgtttagttagttgtgtatttttagtagagttttattatgtttgttagattggttttaaattttttattttaagtgattcgtttatttcggttttttaaagtgttgggattataggcgtttattattacgttcggttaattttttgtatttttagtagagacggggttttatcgtgttagttaggatggttttggttttttgattttatgatttgttcgtttcggttttttaaagtgttgggattataggttttagttatcgcgttcggtttagtttttgtattttttgtagagattagggttttgttatgttgtttaggtttatttgtatgttttcggttttgttttttttttaggtttttgtgattgttgtttttggattgtttgggtgtgtgttttttttttttattagttagggatttttggatggtagagtaaggattgatttttttttgggattttagtattatttagtatagggtgggtttttaggaggttttaggtagtgttcgttgtatgaaattttattgtatttagagatttagtttaggtttagtttttttaagttgattagttgttttttagggtttttataacgttttgtgttattttcgttattgtataatgtagagttgggatttttttagtttgtgagttttttgagaaaaggagttagtattttgtttaagttggggtttttagtattattttgtatagtgttcggttattttaagatatgagtttaggtcgggtgtggtggtttatatttgtaattttagtattttgggaggtcgaggtgggaggattatttgaggttagggattcgagattagtttgggtaatatgataaaattttgtttttattaaaaatataaaaattagttgggcgtggtggtatatatttgtaattttagttattcggaagtttgaggtatgagaatcgtttgaattcgggaggtggaggttagtgagtcgagatcgcgttattgtattttagtttgggcgatagagtaagattttgttttaaaaattaaaaaaaaaaagatatgtgagttgaaattttttgtgaatattaattattttggtgagttttttttgagcgtataggttttttttttggtttttaaagattattattgtttcgttatagtttagcgtattttggattgaaattttttgtttttttttaattaaattgaatgattattggttttttagtgtttagtagagggtttgtttaaatagtagttgttagaaatatataagagagggaagagtattttagggggagggaaggaatttttttagggggaagagagatttgtgggggggaagtgtaggaaggaggagaagcggtcgtgcgtggtggtttacgtttgtaattttagtattttgggaggtcgaggtaagtggattatttgaggttaggagttcgagattagtttggttaatacggcgaaattttatttttattaaaaatataaaaaatgagttgggtatggtagtgggtgtcgtaattttagttatttaggaggttgaggtacgagattcgtttgaattcgggaggcggaggttgtaatgagttgagtttgtattattgtattttagtttgggtgatagagtaagattttgttttaaaaaaaaaaaaaaaaaaaagagaagatagtggtaataagtttttttagtggaagggttgaggcgaggtattgatatcgttttgtttatttttggtttcgttttaaattttgtttatttatttttttattaatttttgtttttagagcggtaattttaatttgttttttttttagttttttttatttagtttgttgtttaaattataaatttaggagttattttggatttttttttttgtttttacgtttagtttattagttagtttttttgttttcgttcgtaaaggtaatcggagtttgattttttgtttgtaggacgtttttttttttaatagatttttttttttttatttttatttttgttataatttaatttttatttagtggtgagttttttaaaatatggggcgaatcgtgttgtttttacgtttaaatttttttacggtttttcgttgaatttagaataaaggagaaattttatattaagttttataaggttttataggatttagttttttattatgatttcgattttatttgtgtttttttcgttttttcggtttttgttataaatacgttaagttttttttattttagggttttgtatttgagggttttagagcggtcgattttggattattttagttaaagtaataggtttttcgtttattattacgttattttgcgttagtttttttttgagagtattttatagttttagagtattgttttattgatttattaaaatttattatttgtttatcgtttgttttttcgagatagggatttttttgatttgtttttgtttttagaaaagtgtttggtatagagtatttaaatatttagcgaatttaggatgatattaagttcgtacgtgtattatttagtttttttagtttttttcgggttacgtttcgttttacggtgttcggcgtatgcgttttttgttcgtcgaggaattttatttttatttcggtttttttttgttcgttttcgcgttttcgtttaggaaatttttggtttttgtttttttttgcgcgttttcgggttaaagggtgttttcgtaatcgttttttagatttatgtgtttggttgtttaagtttcgttttttattaggtttattgtttcgaatttttttttttttttttatttattcgttttaaatagcgtttttcgttatagtttacgtcgtcgtgatttttgattttcgcgcgcgtaagtttagagtcgcggcgtttagagacgggttacgttttcgtttgtttaagtgcgggtaaggttacgtttcgtttgttcgattgtagggtaggtttcgtttttttttttagttttcgaagtggtttcgtttttttgttgaaaaatttttttaatttcgtttttttatgatttgtttgttcgaagttacgttttttcgcgcggttatttttacgatttcgtgcggtttgggcgcgtcgcggttttgttttttttttttttattttcgggtgttgcgcgcgtatttttcgcgttttttcgttcgtttttcgttcggggtcgtgtagggagcgttgtttcgtcgttgtttagtagttagttggtgatttgacgtttaagattttcgtagaggttggtcgataagcggtagagttttggtttgatttgtttttttttattttagttttagtttttttatacgtaaattagatttaataacgtatgatagggatatttgtggggcgttcggtatattatttttaggataaggtgattattggtaattatttttattttcgttgtttttcgttttaaataaatatatttttaagttgtatttttttatttaatttttttttcgttttcgattggaattgtttatttagtttttttagggttggtataggggtaggaaggattggaggaatttcgtcgtttcgtttcgaatttttggcgtttttttttttaaattttgtacgtgttgtttttttaatttggaggtttagtttttaggtttttgttttaggttttagcgattgtttttgttgtgatattttttttgattttttttagttttattatagtgttacgtttattaaagtttttatttttcgagttttggtaggaggatggttattttgtttatagatgtttttagtgtttagaattgtgtttaattgtagttaatgttttggaaatatttattgggtgaatgtttttatttttagaatggttaatttagtgtttggtttataggaggttttagtaaatatttgttgttcggatagaagtttaggtttttttatttatttaaattttgtttattttttaagggtgagttttgatttattttgtttagggaggtgattttgaggttgaggtttttgttttgaatttttatagtaggcgatatattatttaatattgggattttatgtgttattttttttttaatagtttggggatatttagttttatttgtttaattaggttcgggtatttagtgttattgaggtttttagaagttcgcgttttttttattttgtattttagtttcgggttggattgtatttatattttatttttttgtttttgtttttagtttttattaaataaaagtagaggaagaggaaggttttggtttttcgggttaggggggagagttatgggtttttttttttttttgtttaaggtgtattgcgtgttgggtttgaggtgtaagttggggagggagggtagtcgggaagggttagtggtcgggatttgtaatttttttattttttttggaagattcgttgggtagggagggagttttttggatttggattggggtttattttaagggatgagagtcgataggtttataggttcggtttagggttttttttattttaggaagaggaaggggtgtcggcgtttatttgttggagggtggttaggtaaggttgtggggttgggtggttagttttttattcgtggacgttttagattttcgatagtagaggcggtagttttttgttttggagtcgtaaggcgaagatttgtttcgagtgtatagagtttagcgtgcgtaggtttattagttttatgagtatgcgcgggaagcgtagttggttttgagggaggaggtaggtgggcgttggttgagtttttgttttgttaggttttgggaggtttattttaatagaaaggagggttttttttcgattaggcgtgggagttagcgtggggttcgtttttgtgtttggattagatttggtttttagtcgagtagggtggggtttgaggaaagattttgcggaggggagggtagtgtggttggtagaatttagtttgaacggattacgtgggtcgcgggacgtagttggttttgcgtagaggttttgcggggttttatttgcggttttttgatgcgcgtgtaggatagtagcgtttttacgtagggttgttgtaacgtttttacgcggttcggtttttgtacgttgggtcggtcggtcgagaagatgttgatggcgatgagtagggcgtatttagcgtcgtttaggtttagtcgtcgtatggttcgcgagaattcgaagatggggttgatgaattttatttgtaggtttgcggggcgggaggtagttcgtgatttttttagttcgaaatcgtgttttatattttggattttggcgttgtttatagtttttggggttgggaatatagtagtaattatagcgtttttgttatttttgtttatttgtgtttcgtgtttatgagtgttggtatgtagtaggtgtgttatatatgttgtttagtgaaggaatgaatgagggtgtatgtttttttagtattttttattattttattattattttttttttttatttgggcggtggttgtagtttttcgagtttttatttttgttttttttataaaggtaaagggaagtttttaaaatttaggttatatcgtgttggttttagcgttggtttttattgtttaaggtaaagtttaaatttatttttaaaattgatttgtttatttagttattaaatgttattgagtatttgttacgtgttaggttttagtatttatatttgagagtttaggggatcggttatagataaatatattaggaagaggtttagtttgttagagggttgtgagtttaatggaattaggtagtgtagagaagtgtgaagggttttgttgagttatggttttattttatataaggcgggtagggaaggttgcgttttgggtgacgttggagtagtgattaattcgaaggagatgagggattgtgagggtgattaacgtttgttgtttttatgatttgggacgggggttatttaggttatgagatttttagtgttaaaattgggaaggttttgggtaaattaggattagttggtttttttagttttgggtagaggaaattttaagtatataggtttttggttgtagtatgttggatgggtgttagtaagaggttagagtggttggaatagggggagagggtgagagttgagggtagagagtgagcgaggttaggttttaaagggttttgtgggttatagagaggattttagttttttttttagtgagacgggagtcgcggagggttttgagcggaggagggaagtgggtagttttaagtgttgataggatttttttgtttgtgttgtgagtagttttattaggtaggggtggaggtaggcggttttttaaggggattttggtagtgttttagggtggtggtagaggagcggttgggaaggggtagggtgggattttcgattttttttttattttatttttttgtgttttagttgtttgggtttttttgtagtttttttaaattattagttttttttaattttagggtttttgtaatcgttaattttttttgttagaaacgtttttttgtagttttgttttgttaagtttatattaaaagggttattgggatcgtttcgggtggtgaaagggtcggagtaagaggaaggggagagggtggggtttggatagatgtcgggaaatatagagaggttttttagagattgtgggataatgagggagcgaggttttggtgtatgttttgtagtattagtaatgttttttttattttttttttaggtagtgttttttattgtttaggtttttttttagaagtttatttacgtaggttagcgtttttagagggtaggaagtagtgtttttttagatagtaaagaaggttgttcgttttataatggatcgagttttagttcgttttttttgggtgagattacgttttggcgggggcggggaatgttttttttaatgtttattaagatgtttgatgtggtaatagggttttttttattttaatttttattgtaatttaatgtatagagtcggtatttaatatatgttttttttaaaaaatagagatacggttttttttgttattaggttggaatgtcgtcgtataattacggtttattatagttttaagtaatttgttttttttagtttcgagtggttgggattattggcgtgtattattatacgtggtatatgtatttttattttatttttattttggtttaatttttattttaattttggagataaagaaatagagattttaatagggatgagttggttttaggttttttagttagtaggggcgttaagttttttcgaagttttttttgggttttatttgtacggtggaagtcgtttttgttgtaggtgaagttttttaagaaggtgatatattttgtttcgtggttgtagcgtttggttgtttttagtagtatgatttaagggcggtagcgggagggggagtttgagttttgtgattttttagttgttagtttttttttttttggtttaaatgggggtttaattttattaggattattttttgttttttttttttttgtttttttagttatattagcgtgtagttattacgtgagatagttcgagttttttttttattttaggttttcgtatatgttgtatttttatttttttaggatattttttttttaggtgagtataaggtttggggtacggggtttgatttgttttgttttttgttttatatgttaatatttggaatagagtttggtatatagtacgtgtttaatatttatatgttatttttattttgatttaaatgttaatttttttgaaaagtttttttggtaatttttttttgtaatagcgtttttagtttgatttttaatttttttagt

SEQ ID NO: 41 - DNA, 8537 bp, Artificial Sequence
  chemically treated genomic DNA (Homo sapiens)
ttggattacggtatttgtaagtttaatggatgtgaaattgattgaattttaagaaattatagtaaattatatttagttgaattttggggaaatatatttgtagaaagatgtttatttatttataatgtatgtttgttattttaggatttttattttgtaagtatattagaggaggtgaattaggagtagattagattatttgatatatattattttatatataaagaatatatatatatgtatgtgtgtgtgtatgtatttttatatatatatatttatatatatgtatttatattttttttttttttttttttgagataaagttttattttttcgtttagattggagtgtagtggtgtaaggtgtaattatagtttattgtaattttgaatttttgggtttaagtaattttttttttttagttttttagatagttaggattataagtgtgtattatcgtatttggttaatttttaaaaaaaggttttttttggttaggcgcggtggtttacgtttgtaattttagtattttgggaggtcgaggcggattatgaggtttggagttcgagattattttggttaatatggtgaaattttatttttattaaaaatataaaaaatgagtcgggcgtggtggtatgtgtttgtagttttagttattcgggaggttgaggtaggagtatcgtttgaatttgggaggtcgaggttgtagtgagtttagattttattattgtattttagtttggcgatagatcgagattttattttaaaataaaaatataaaaaaaataaaataatatttttttttgtagagttggggggttttattatattgtttagattagtttttaatttttggttttaaatggtttttttattttagttttttaatgtattaggattataagtgtgagttattatattttaaaattttttaattaatatatttataaatatttttagagaatgttaatttaattattagagggaaatttagtttgttttatttttaagtttttagtgggttgttttggaagaaaggaatagaaattatttaaattagtttaattaataaaaatagaaggtagagttattggaatgtagggatattttataatttaagagtattaatttttaagagtttaaggttttttttaaaaaaaaaaaaaaaaagtaaaaaagaatttaagagtaggaggagtaagtattgttaggtttttgagaaattggaaaggcgatttggaaaggagttagaatttaaatggtttatttatttttgattttttttttagtattttaatttttttttttttttttttttttttttttttttgagatagagttttgttttgttatttaggttggagtgtagtggtacgattttagtttattgtaatttttgttttttagttttatgcgatttttttgttttggttttttgcgtagttggaggttaatgtttgtatttttagtagagatggggttttattatgttggttaggttggtttcgaatttttgattttaggtgatgcgtttgttttagttttcgaaagtgttgggattataggtttgagttattatattcgatattaattttttaatttttttgtagatgtgttttttttgattggatatttatatatatttatttgtgtattttgttttataaatttttgaggttagatttgaatataaagttaagtttaattttttaggagtaggaaaatgattggttaatttggggttagatgaatattgttggtataattggtggttagaaaggtaaaagttatgtgattatagttagttaggaggagggttgtaggtttgtagatgttttaagggtgtgggaagaatcggaggtaaaggtgtgtaattttgatatggaagaaagtttattattattataggtagtatttataattattaagttaggttgtttttatatttagaaagttgtttgagtttgttttttttgttatttttttaatttagaggattttaacgttttaatatagatttgtcgtttattaggaattgggttgtatagtaggtgagtagttagtaagtaagtattattgtttgagttttgttttttgttagattaaggagagtattagatttttataggaatttaaaatttattttgaattgtatttgtgaggaatttagattgtatattttttatggaaatttaattgatgattttgaggtgtaatagttttatttcgaaattattttttgttttatgtttatttttcgagttttgtggaaaattgttttttatagaatagttttttggtgttaaaaaggtagaattggaatttaatttaaatttttatttttttgttgaaatattgtaagaattttttttttggtgtttttatttttacgtttttgaaatttgttttttaacgttataaggtaatagtgtgaggattaattaaaaattttgttaattttaaagtattttataaatataaagtagtaataaggttattgtaatggtttatatttgtaattttaatattttgggaggttaaggtgggaggattatttgaggttaggagtttaaggttaatttgaatagagcgagatgttgttttaaaaataaaaaaataaggtcgggtgcggtggtttatatttgtaattttagtattttgggaggttacggtaggtggattatttgaggttaggagttcgagattagtttggttaatatggtgaaattttgtttttattaaaaatataaaaaattagttgggcgtggtggtaggcgtttgtaattttagttatttgggaggttgaggtaggaagattcgtttgaatttgggaggtggggttgtagtgagttgatattacgtttttgtattttagtttgggtaatagagtaagattttatttaaaataaataaataaataaataaataaaaataaaaataaattggtaagtggagggaaaatagatttaattaaatgatttgtttttttaaaaattttaatgatttttttagtatttagagattaaagttttttatttttttttttttttttgagacggagttttgttttgttgtttaggttggagtgtagtggcgtgatttcgtttattgtaatttttatttttcgggtttaagtatttttttgttttagttttttaaagagttgggattataggtatgtattattacgttcggttaatttttgtagttttagtagagatggggttttgttattttggttaggttggttttgaatttttgatttcgtgattcgtttattttggttttttaaagttttgggattataggtttgagttatcgcgtttggtttttttttatatgttttgttgttgtcgtttgttttttgagataaggttttattttgtagtttaggttggagtgtagtggtttattatagtttattgtagttttgacgttttgagtttaagtagtttttttattttagttttcgggatagttgagattataggtataagttattacgtttagtttattttattttatttttttttgagatatggggttttattatgttgtttaggttggtttttaatttttgagtttaagcgatttttttttattttggttttttaaagtgttgggattataggtgtgagttatcgtgtaggttttatatgatttttatattttgaattaaatgtaattttttagtttcggtatttgttttggtattttttttttttcgttagataatattaatttttaattatgtagttcgtttttatgtttatattattttatttgtttataatgttttttatttcgtttaagaaattttatttagttagtttgtggtgttgttttgatatagtttcgttttgtcgtttaggttggagtatagcggcgagatttcggttggttgtaatttttttttgagtttaagcgatttttatgttttagtttttcgagtagttaggattataggtatgtgttataaaatttggttaatttttgtattttttattaaagacgaggttttattacgttggttaggtttatttttaatttttgattttaggtgattcgtttgttttggttttttaaattgttgggattattggcgtgaattatcgcgttcggttttatttagtttttaaaatcggaattacgggttaaaattttttggtaaattacgatacggtttaggttatgaaatttaatgttttttttttttgaatttttgtaaatttttagtaaagtattatagattgacgaatattttagttatttttttttttcgtacgttagttttattttttatttttatttattttttcgagtttttttagtttttttatttttatgaggtttggaaagtattttgttttaggaatgcgagtaggaggtttagagcgattagaagtgttaaaagttgatatttagatattgtcgaaataaattataagagcgttagggttttcgttaatagtttagttgcgatggtgagaattcgcggattcgtcggcgatgtatgtcgggagatgtagtttcgggtcgacgtattattttttgggagtcgtggttttcgatttggtaaatagaagacggtaattcggttaagtttttttttatcgttttttgaaatttttcgttttattcgcgagggattggggtaggagtaggggcgttgtcgtggttagtttcgaatttttaggtttagacgatattttcgtttcggtttttcgagtagttgggattatacgcgtgagttatcgttttcggtataaagtttgaattagtttttacgtaaaaagggaagagggtagtttgtaaattcgcgtaggattaagttttcgagttttcgttttgggttagcgcgtagggcggaagcggggagaaggcggattcgggaggcggggatacgttacgtcgacgcgggcgtgattttgggcgagagggtttggcgggaattttgaaagtcgttggcggatcgcgcgtagcggttagagatcgagttttaaggagagtgcggcgtttttcgaggcgtgtagttgggaattgtaatttatttgggttgtgcgtagaaggttggggtaagcgagtagagaagtggagcgtaagttaggggcgttgggggtcgtgcgggtcgggcgcgtgttacgttcgcggggtgaagtcggagcgcggggtttgttggagagaggagcgttgcggatcgaggtgagtgtgtgaggcgtaggttgggttttttagagtcgcggttcgttttcgtttatttgcgttttggtcggtttagtgtttagcggtagttggggttttcgcgcgtagtgtgaaattcggacgtggtagggcgtgttcgcgttcgatcgatttttagttgttggggcgaaaatataagtggattttagtttttagaattaggggagaaatattagagtttttataggtaatatttattttatgggttcgagcgagaagttcgagattagagcggtgtagttatagttgtttaatattatagttagggttttcggatttttgatttgtttttttattatatcgtgtttagaaagtattaattttcgattgttaaaatagtgtttttattatttaatgcggaaaattatttatatgatgtttagagaatgatttgaagtgaggtttggtttttttaaaattttttttttgagatggagtttcgttttttcgtttaggttggagtgtagtggcgcgatttcggtttattgtaattttcgtttttcggatttaagcgatttttttattttagtttttcgaggagttgggattataggtttttattattacgtcgttaggttgatttttgtatttttagtagagacggggttttattatgttggttaggttggtttcgaatttttgattttaggttatttattcgtttttgttttttaaagtgttgggattatagtcgtgagttatagcgtttggtttttgtttttttgtttgtttgtttgtttttaatttttaaagcgaaatgtaatatatatgtagaaaaatttatatttataattgtatataatttcgtgaattattataaaatatattggtcgggcgtcgtgttttacgtttgtagttttagtattttgggaagtggaggcgggaggacgattgagtttaagagttcgagaatagtttggttaagatagtgagattcgtatttttataaataggaaaaattagttaggtatggtggcgtgtatttgtaggtttagttatttaggaggttgagaagggaggatttagtttgggaggtataagttgtagtgagttgtgattaggttattgtattttaatttgggcgatagagtaagataaaatgaatatatatttatgtaattattatttaatagaatggtttttagaagtttttttgtgtagtatttaatatttttttttttttatagtggtaattgttatattggtttttaatgagatgaattaatgttgtttgtttttgaattttatataaaaatatattaggagtgttgagtgtttcgttgttttatatgtttgttaatacgatattttttagtttttttgattttaattattttgttggttatatagtaatgttttaatgtgattttaatttttttgattaataatgatgttggatatttgtttatatgtttttgtttattttgatattttttgtgatgtgtttgtttaaattttttgtttatttttttattattttttttttattgatgtgaagttttttatatattggttattagtttttagttatgtttgtgttaaatgttttttttattgtggtttgatttgttatttttttagtggtgttttttgatgaatagaagtgttgaatttatttttttattatttatttatttatttatttttttttttgagatagagtttggtttttgttgtttaggttggagtgtaatggtataattttggtttatcgtaattttcgttttttgggtttaagcgatttttttgttttagtttttcgagtagttgggattataggtatgtgttattacgtttagttaattttgtatttttttttaatagagataggatttttttatgttggttaggttggttttgaatttttgaatttaggtgatttgttcgttttggttttttaaagtgttgggattgtagacgtgagttatagtgtttagtagaagtgttgaatttaaatgtagtttagtttttagtttttttttttttggttagtgcgttatgtatttagttttaagaaatttttttttgttttaaggttgtgaaaataataagtgttattttgtttttgatagacgattgtatatatttatgagatataagatgatatttttttttttttttttttttttttgagacggagttttattttgtcgtttaggttggagtgtagtggcgcgattttggtttattgtaagtttcgttttttgggtttacgttatttttttgttttagtttgttattacgtttagttaattttttgtattttttagtagagatagggttttattatgttagttaggatggtttcgattttttgatttggtgatttattcgttttggttttttaaagtgttgggattataggcgtgagttattttatttggtttaagatgatattttaatatatatatatattgtataatgaatgattaaattagggtaattagtatatttattagtttatttaaatatttgttatttttttttgtgatgagaatatttaaaatattcgtttttggttattttgaagtatatattatattagtgtttattgtagttattttattgtgaaatagaattttagaatttattttttttatttaattgaaattttgtgtttgttgattaattttttttttttttgtcgttttttgtaatagttgtattttttttagtttttggttattattgttttatttgttttttgtatgagatgaatttttttttttttgtttttttttttgagatatagttttattttgttatgaggttggagtatagtggtacgatttcggtttattgcgatttttgtttttcgggttgaagttatttatttgttttagtttttcgagtagttgggattataggcgtgtgttattatattttgttaatatttgtatttttagtagggacggggtttcgtatgttggtcgggatggttttgattttttgatttggtgatttgttcgtttcggttttttaaagtgttgggattataggtatgagttatcgcgtttcgttaagattaatttttttagattttatatatgagtgagattatgtagtatttgtttgtaaatatatttataatgtataatggggtatataaaaataagtaaaatttggtttttatattgaaggaatataaagtaggagaatagagaggtataataagagaatggttttggttttttttaaagtttttttgatacgattagttagatagaagatggggagagagatgtattttatttttttagtgtttatattgataagtatttgtattttttagt

SEQ ID NO: 42 - DNA, 8537 bp, Artificial Sequence
  chemically treated genomic DNA (Homo sapiens)
attgaaaaatataaatgtttattagtataaatattagagaaataaggtgtatttttttttttattttttatttagttagtcgtattaaaaagattttaggaaaagttaaggttatttttttattgtgtttttttgtttttttgttttatatttttttagtgtaggggttaagttttatttatttttatatattttattatatattataaatgtgtttgtagataaatattgtatgattttatttatatgtagaatttaaaaaagttgattttggcggggcgcggtggtttatgtttgtgattttagtattttgggaggtcgaggcgggtagattattaggttaggagattaagattatttcggttaatatgcgaaatttcgtttttattaaaaatataaatattagtagggtgtggtggtatacgtttgtagttttagttattcgggaggttgaggtaggtaaatggttttaattcggaagatagagatcgtagtgagtcgagatcgtgttattgtattttagttttatgatagagtgagattgtgttttaaaaaaaaaaataaaaaaaaaaaagtttattttatataaggaataaatagaatagtggtaattagagattgaggagaatgtagttgttgtagggggcggtaggaaggagagaggttggttaataggtataaagttttagttagataggaggaataagttttagggttttattttatagtagggtgattatagtaaatattaatgtaatgtatattttaaaatagttagaagcgagtattttgaatgtttttattataaagagaaatgataagtgtttaagtgaattgatggatatgttgattattttgatttgattatttattatataatgtatatatgtattgaaatattattttgggttaggtggagtggtttacgtttgtaattttagtattttgggaggttaaggcgggtggattattaggttaggagatcgagattattttggttaatatggtgaaattttgtttttattaaaaaatataaaaaattagttgggcgtggtggtaggttgagataggagaatggcgtgaatttaggaggcggagtttgtagtgagttaagatcgcgttattgtattttagtttgggcgatagagtgagatttcgttttaaaaaaaaaaaaaaaaaaaaagaaatattattttgtattttataaatatgtataatcgtttgttaaaaataaagtaatatttattatttttataattttgggatagaaaaagattttttgaaattggatgtataacgtattagttaaaaaggaaaagattgaaaattgaattatatttaaatttagtatttttattgggtattgtggtttacgtttgtaattttagtattttgggaggttaaggcgggtagattatttaagtttaggagtttaagattagtttgattaatatggagaaattttgtttttattaaagaaaaatataaaattagttgggcgtggtggtatatgtttgtaattttagttattcgggaggttgaggtaggagaatcgtttgaatttaggaggcggaggttgcggtgagttaagattgtgttattgtattttagtttgggtaataagagttaaattttgttttaaaaggaaaaataaataaataaataaataataaaaaaataaatttagtatttttatttattaaaggatattattaagagagtgataagttaaattatagtagagaaaatatttagtataaatataattgagggttgataattagtatataaagaattttatattagtaagaaaaagataatagaaaaataggtaagagatttgaataagtatattatagaagatattaaaatgggtaaaaatatatgaatagatgtttaatattattattaattaggaaaattaaaattatattgagatattattgtgtaattagtagaatagttaaaattaaaaaggttgaaaaatatcgtgttggtaagtatgtgaaataacgaaatatttaatatttttgatgtatttttatataaaatttaaaaataagtaatattagtttattttattagaaattagtatagtagttattattgtaaaaaggggaaaatattaaatattatataggaaggtttttgaggattattttattaagtggtgattatataggtgtatatttattttgttttgttttatcgtttaggttggagtgtagtggtttgattatagtttattgtagtttatattttttaggttagattttttttttttagttttttgaatagttgggtttataggtgtacgttattatgtttagttaattttttttatttgtagagatgcgggttttattattttgattaggttgttttcgaatttttgggtttaatcgttttttcgtttttattttttaaagtgttgggattatagacgtgagatacgacgttcggttagtatattttgtaataatttacggagttgtatatagttgtgaatgtgaatttttttatatgtatattatatttcgttttagaagttaaaaataaataaataaataaaaaaataggggttaggcgttgtggtttacggttgtaattttagtattttgggaggtagaggcgggtggataatttgaggttagaagttcgagattagtttgattaatatggtgaaatttcgtttttattaaaaatataaaaattagtttggcggcgtggtggtgggggtttgtaattttagtttttcgggaggttgaggtaggagaatcgtttgaattcgggaggcggaggttgtagtgagtcgagatcgcgttattatattttagtttgggcggaagagcgagattttattttaaaaaaaaagttttaagaaaattaaattttattttagattattttttaggtattatgtgaatggtttttcgtattagatgatgaaaatattgttttggtaatcggagattggtattttttaagtacggtgtaatggaaagatagattaggaattcggaagttttggttgtgatattaaatagttgtggttatatcgttttgatttcggatttttcgttcgaatttataaaataggtgttgtttataaaggttttaatgttttttttttagttttaaagattgaggtttatttgtgttttcgttttagtagttgagggtcggtcgggcgcggatacgttttgttacgttcgggttttatattgcgcgcggaggttttaattgtcgttgagtattggatcggttaggacgtaggtgggcgaggacgagtcgcggttttggagggtttagtttgcgttttatatatttatttcggttcgtagcgtttttttttttagtaggtttcgcgtttcgattttatttcgcgggcgtggtacgcgttcgattcgtacggtttttaacgtttttggtttacgttttatttttttattcgtttgttttagttttttgcgtataatttagatgagttgtagtttttagttgtacgtttcgggaagcgtcgtattttttttagggttcggtttttggtcgttgcgcgcggttcgttagcggtttttagaattttcgttaaattttttcgtttagggttacgttcgcgtcgacgtaacgtattttcgtttttcggattcgtttttttttcgttttcgttttgcgcgttaatttaagacgggagttcgagagtttgattttgcgcgagtttatagattgtttttttttttttttgcgtaaggattaatttaaattttatgtcgggggcggtggtttacgcgtgtagttttagttgttcgggaggtcgaggcgagagtatcgtttgagtttaggagttcgaggttaattacggtaacgtttttatttttattttagtttttcgcgggtggggcgagggattttagggggcggtgggggaagatttaatcgagttgtcgttttttgtttattagatcgaagattacgatttttaagaggtaatgcgtcggttcgggattatatttttcggtatgtatcgtcggcgggttcgcgagtttttattatcgtagttggattattagcgggggttttagcgtttttgtggtttgtttcggtagtatttgaatgttagtttttggtatttttggtcgttttgagttttttattcgtatttttggagtaaggtgttttttaggttttatggaggtggaggagttgaggaagttcgagaagatggatagaagtgggaaatggagttagcgtacgggagagggaaatggttggaatattcgttaatttgtggtgttttattggagatttgtaggagtttagaggaagggggtattgaattttataatttaaatcgtatcgtggtttattagaaagttttgattcgtgatttcggttttaaaggttgagtagggtcgggcgcggtggtttacgttagtaattttagtagtttaggaggttaaggtaggcggattatttgaggttaggggttggagataaatttggttaacgtggtgaaatttcgtttttagtaaaaaatataaaaattagttaggttttgtggtatatgtttgtaattttagttattcgaaaggttgaggtatgagaatcgtttgaatttaggaggaggttgtagttaatcgagatttcgtcgttgtattttagtttgggcgatagagcgagattgtgttaaaataatattataagttagttgagtagggttttttgggcgaagtggaagatattataagtaaatagggtagtatgggtatggaaacgaattatatgattaaagattagtattatttggcgagggaggaaaagtgttagagtaagtgtcgaaattggaaggttatatttagtttaggatatgaagattatataaggtttgtacggtggtttatatttgtaattttagtattttgggaagttaaggtgggggaggatcgtttgagtttaggagttggagattagtttgggtaatatagtgggattttatattttaaaaaaaaataaaataaaataagttgggcgtggtggtttgtgtttgtggttttagttatttcggaggttgaggtgggaggattgtttgagtttaggacgttaaggttgtagtgagttatgatgggttattgtattttagtttgggttatagagtgagattttgttttaaaagataagcgataataataaaatatgtaaggagaggttaggcgcggtggtttaagtttgtaattttagaattttgggaggttaaggtgggcggattacgaggttaggagtttaagattagtttggttaagatggtaaaattttatttttattaaaattataaaaattagtcgggcgtggtggtgtatgtttgtaattttagttttttgggaggttgaggtagagaagtgtttgaattcgggaggtggaggttgtagtgagcgagattacgttattgtattttagtttgggtaatagagtaagatttcgttttaaaaaaaaaaaaaaaggtaaggagttttggtttttaggtattgaagaaattattgaagtttttaagaagataagttatttggttagatttattttttttttatttattaatttatttttatttttatttatttatttatttatttattttagatggagttttgttttgttgtttaggttggagtgtagggacgtggtattagtttattgtaattttattttttagatttaagcgagtttttttgttttagttttttaagtaattgggattataggcgtttgttattacgtttagttaattttttgtatttttagtagagatagggttttattatgttggttaggttggtttcgaatttttgattttaggtgatttatttatcgtggttttttaaagtgttgggattataggtgtgaattatcgtattcggttttatttttttatttttgagatagtatttcgttttgtttaagttggttttgaatttttggttttaagtgatttttttattttggttttttaaagtgttggaattataggtgtgaattattgtaatggttttattattattttatatttgtggagtgttttaaagttgataaagtttttagttaatttttatattattattttgtggcgttgaagaatagattttaggagcgtgaaagtgaagatattaaaaaggaagtttttgtaatattttaataaagagatgaagatttggattagattttagttttatttttttggtattagggagttgttttgtgaaagataattttttatagggttcggggggtgggtatgaggtagaggatggtttcggaatgaaattgttgtattttaagattattaattagatttttataaggagtgtgtaatttagattttttataggtgtagtttaaaataggttttgagtttttgtgagaatttaatgttttttttgatttgataggaggtagagtttaggtagtaatgtttgtttgttagttgtttatttgttgtgtagtttagtttttaataggcgataggtttgtgttggggcgttggggttttttgaattagaggaatgatagagagaatagatttaggtagttttttggatgtagaaataatttaatttagtgattatagatattatttgtgataatagtgaatttttttttatattaaagttatatatttttgttttcggttttttttatatttttagagtatttgtaaatttatagttttttttttagttgattgtagttatatgatttttatttttttggttattagttgtattagtagtgtttatttggttttaaattggttaattatttttttgtttttggaaaattagatttggttttatatttaagtttgattttaggaatttatggggtaaagtatatagatagatgtgtgtgaatgtttaattagagaaagtatatttgtagaaagattaagaaattgatgtcgggtgtggtggtttaagtttgtaattttagtattttcggaggttgaggtaggcgtattatttgaggttaggagttcgagattagtttgattaatatggtgaaattttatttttattaaaaatataaatattagtttttagttacgtaggaggttaaggtaggagaatcgtatgaaattgggaggtagaggttgtagtgagttgagatcgtgttattgtattttagtttggatgatagagtaagattttgttttaaaaaaaaaaaaaaaaagaaaaagaaaaagaaattgagatattaaggagagagttaaagataaataaattatttgaattttgatttttttttagatcgtttttttagttttttagaagtttagtagtatttattttttttgtttttgggtttttttttattttttttttttttttttaaaaaaaattttgaatttttaaggattaatgtttttgagttatgagatatttttatattttaataattttattttttatttttattgattaaattagtttgagtagtttttgttttttttttttaaaataatttattgagaatttggaaataaggtaaattagatttttttttaatagttaaattggtattttttgagaatatttataaatgtgttaattgaaaaattttggagtgtggtggtttatatttgtaattttagtgtattgagaggttgaggtgagaggattatttgaggttaggagttagagattagtttgggtaatgtagtgagattttttaattttataaaaaaaaatgttgttttgttttttttgtgtttttgttttgagatagagtttcggtttgtcgttaggttggagtgtagtggtgagatttgggtttattgtaatttcggttttttaggtttaagcgatatttttgttttagtttttcgagtagttgggattataggtatatgttattacgttcggtttattttttgtatttttagtagagatggagttttattatgttggttaggatggtttcgaattttagattttatgattcgtttcggttttttaaagtgttgggattatagacgtgagttatcgcgtttggttaaaaaaaatttttttttaaaaattagttaggtgcggtgatgtatatttgtagttttagttgtttgggaagttgaggaggggagattgtttgagtttaggagtttaaggttatagtgagttatgattgtattttgtattattgtattttagtttgggcgaaagagtgaaattttgttttaaaaaaaaaaaaaaaaaaagtataaatatatatatataaatgtatatatatagagatatatatatatatatatatatatatatgtattttttatatataaggtaatgtgtattaagtgatttaatttgtttttaatttattttttttagtatgtttataaaatgagagttttggaatagtagatatgtattgtaaataaatgaatatttttttataagtatatttttttaaggtttaattgaatatagtttgttataattttttaaaatttaattaattttatatttattaaatttataagtatcgtaatttag

SEQ ID NO: 43 - DNA, 7304 bp, Artificial Sequence
  chemically treated genomic DNA (Homo sapiens)
cggtcgtggttattattttttaaagttttatgtttttaggttaaaaaaaaaataaatttttttttagttataataaaaattttatattattttttttttatgtttttagaaatagtttagttaatttgaaaatgtttcgttattggaatattttgataggttaattatagatattaatagtaataggttttttttatttttagaattatattaagatagttatataagttagaaatgtaatatgttagaaatatttaataaagattttgatagattataagttttatgagggtagagaatttattttgtttattttgttatttggtatataattagtatttaattaatatttaattttgttttagtgatttagtttttagagtgttaattttgaatgtagattttagttataggattattgtggattaagttaaagaaaataaaatatataaaagtattttatttcggtatttttataattatagattttttttgttttgttttgtttttgagattgagttttttttttgtcgtttaggttggagtatagtgttataatatcggtttattgtaatttttgttttttatgttttagtaatttttttgttttagttttttaaatagttgggattataggtattttttattatttttagttaattttgtatttttagtagagacggggttttattatatcgtttaggttggttttgaatttttgattttaagtgatttgttagttttagttttttaaagtgatgggattataggtgtgagttatagtgtttggtttaattgtaaatatttttaaaaaacgttttagtattagtattttgttgagttaggtattttataaggatttattttaattgaatatgcgtattagaatgttgtaaaaattgagaaatagatttagatttattatgtatttttttgtgtgataagtattgtatatgtgttaatttaattttgattaaaattttaggagatattattttttatttgtaggtgaggagattgagtaatttgttgaaggttatatagttggtaatttttagatatgtgatataaatttaaatttgtgtgatttcgtagtttatgttggtttgtttatagtaatgttttttaaatttttttatgaagtaattttaagttgtaagaaaaattaaaatatattttcggggggggtttgggagattattgaagtatttagtttaagtttgatgtgtttttgattttatattttttttttaaattttatttttatatttgtattttatttttatattttgtttttatttttatatatatatttttttttgagatggagtttcgttttgttatagaggttggagtgtagtggtatgattttggtttattgtaagttttgtttttcgggtttatattatttttttgttttagttttttaagtagttgggattataggtgtttgttattatattcggttaattttttgtatttttagtagagatggggttttatcgtgttagttaggatagtttattttttgatttcgtgattcgtttatttcggttttttaaagtgttgtgaaataggcgtgagatattacgtttagttaatttatttatttttagagggagtttttttttgtttttaggttagagtgtagtggtttgattttatttattgtaatttttgttttttgggtttaagttatttttttgttttagttttttaagtagttgggattataggtatatattaatatgtttagttaatttttgtgtttttagtagagatagggtttcgttatgttggttaggatggttttgattttttgattttatgatttattcgttttggttttttaaagtgttaggattataggagtgagttatcgtgttcggtttattttatgttttattaaagtttatttttttttttaaaaattttaatgatttatttatattatatagatgtaatgtttgtttaatataaattattttaaatgatttaggtaaattatttaatttttttttttttgaaagattttttttgagaaaagtgattatataagaaggtgtattttttatatttattttatagttttgtttagtttttagtgcgtggttttaaaaatttggattttagtttgaaagtatgattatagagtaaattgtattaaagatattttaagaatgatgatgaaaataattattataggtaagggttagaagattttttttttttttttttttgagatggagtttcgttttgtcgtttaggttggaatgtggtggcgtgatttaggtttattgtaagtttcgttttttgggtttatgtaatttttttgttttagtttttcgagtagttgggattataggcgtttattatcgtatttagttaattttttgtatttttagtagagacggggttttattatgttagttaggatggtttcgattttttgattttgtgatttgtagaagatattaatagtatttaaattatatagttatagatagagttgagtgggggtttttttgttttttttattttgttttgttttgtttttgagatggagtttcgttttgtcgtttagattggagtggagttacgtaattttagtttattgtaattttaatttttcgggtttaattggtttttttattttagttttttaagtagttgggattagaggtatgtattattatgttggttaatttttgtattttttgtagagatggggttttgttttgttgtttaggttggttttaaatttttgagattaagcgatgtgttttttttggttttttaaagtgtttggattttaggtttaagttattgtgttaggttaaagtagttttgaattttttattgttaacgaaagaaattttaaatacgattgattttattgagtttgattaaattaattgaagatttattgttgaatgtggtaatattatgttttttttttatttaagaatttgggtgttttataagtataagtatgaaatttttttgaagatagtatttatgtatttattgagcgtttaaatatagattatattagaagttaagtaatgggttgagtggttaattatattttggttagttttataagattttttttgatttattaaatggggtataaatgtttttcgtatttttttcgttagtagggatttaaaattttaatagttcggggtagtaaaaaggatgttaggtttgaattttggttttaagaaaattgtgttgaggtgttttgtttgtttgagatagggttttattttattatttaagttggagtgtagtggcgtgattatagtttatttttaggttgaagggatttttttattatagatttttgagtagttgggacgatcggtgtatgttattatgttcggttaattttttgtatttttggtatagatagtgtttcgttatgttgtcgaggttggttttaaatttatgagtttaaagagatttatttgtttcgattttttaaagtgttgggattataggtacgagttattgcgttcggttagtttttttttttttattagaattgatattaaattatatgttgagtttttatgtttttattttttttttggtatggttatggttatttgaaatgtgtgggatttgttaaagtgtttaatatacgttgtttttttttttagatttaagtatgtagagggttttgatttgtaatatttagaaagtttttttaagttgggaagaaaagttaagattaagaattattgttaatagggtcgggcgcggtggtttacgtttgtatttttagtattttgggaggtcgaggtaggcggattacgaggttaggagttcgagattagtttggttaatatggtgaaattttttttttgggaataatataaaaattagtcgggtatggtggcgtgcgtttgtaattttaggtatttaagaggttgaggtaggagatttatttgaattcgggaggcgaaggttgtagtgagtcgatatcgtgttattgtattttattatgggtaatatagtgagattttgttttaaaaaaaaaaaaaaaaaaatcgttaataggtagggaataagttattttttgttaaataagttatatttatttaggtaaggaaggaatttataaattattttttaaattgtttgttttttttttcgaagttttgtaatttagaggcggttattattattgtttgaatatttttttttaagtttgtattataaaaggagtttttgtgtagtttagttttttttttttaggattttaggagtttagatatattaatggggatattagttgtttatttttttagttattgtttaagttaggtaggttatgaagaaataacggttttagtaatttttatgttcgggatacgattttcgggaagacgtgggtgggtgcggggaatgcggattgattttttttagcggtcgttgggggttggtttataatttttcgcgagggcgggaaaagtaatgtggtcgttgcggggggggggggttagaaaagggggacggttagcgggaagagttaagagattgtaattttataaagagtacgtagattaattttaatgattgttttttgagttttttatattaaaataatggtaattggttagtgtgtgttcgttacgtttattatttttattcgagattatttttattaatgattttgaggttttatttaataggttacggtggaggtaaggaaatgtggcgtggagaatttattgggtttggtttttcgttttatggttttcgtttatcgttttatagttagggtgtatatttgatgaggaatttttaaatgggattttggggaattaaaacggaatggtgtataagtgtgaaaatttataagattgcgtaaagttgtaaggttcggagtttcgtgcggttaggtcgtagagtcggtttttttcgttttacgtttgacgttacgtcgtacgttttagcgagggcgtgcggagtttggttgtttcggggttagtaggtgagtttgcgatgcgcgggaagacgtttcgttttgaaatgtagcgggatttggtgagtttttcgttgtttttagcggtgcgggtgaagttggtgtttgcggggttttagattgttgaggaatttttagaggtgaaatttttcgagtttagtaaaggtaacgatttttgatggtaagttgaggtatatcggtcgtcgttagcgtcgttttagttttcgttttttcgtttcggtttttagtttagttttcgttagattttgtttttttttacgtttatgtttatagcgtgaaagagtttttcgattttatttataagttgtttgaatggttaggagaattgtggtcgtgaaaatatttattaattgttttttttttggtaatgtttgttgaatgttttgaggattgttttatttaatttttaattcgtttacgtagattattatatttagtatatggatgagagaattgatattttggggagtttaggtaattttttatgttaattgggttaggaaatattggagttagaattggttgtttaatttttgttgttttaagatttaaggggtaagggttaaattttagaaatgtaggattttgtgtaggattagagatattaagaatgagaaagagagtagaattttcggaattttgaggaagtatagaaagaatatttttttacgtaattaattgaaatatttaaaattttatattttagagtattgtagatgggaattattgtattttgagatatataaatatgaggttggcggtggttatttgttgtgtatatttttttatgatatgtttggatttgtgttatttattgaagaagatggaatagaattttaagttattgtttttattgatggaaaatatagaggttttaattcgtttttaaagaataagtttcgtggatttagttttaattgtttaagttatatcgcgcgtagattgtgttttttaagatttgatgggtttttttttttttaataagttggttttttaaagaagaaatgtgagattttgaataataatgattattaataattattgattattttagatggttttgatattttattaagttttttatatgtatcgttttatttttattttatagacgaaaaaaatttgagtaaaaaagaaaaagtgaagtaatttgtttaaagttatgtagtaagtggtgttaggatttataaatttaggtaatttaattttagtatttaggtttttgataggatttttattttttaaatgttgttattattattgttttttattagttttatatttatggtttatatttttattagattaagtattgatatattaaattgataagtgatgttatttttattattatttttttattagtttgttttgtaattgttattttttttttttaggttatattgttagatgggtgaaattgtgtagtcgaggaagtataaatgtattttttaaaatgtttgtgttttgaataattgtttttattagtttggagtgatatatgaattttttatattagttatttttatgaaaagtttttattataaataatatatgtatatgtgttttttaaagttgtattttgttttaggtagttaaaatatttatttttatttttatttgaaaaataatttgtatattttatgagagcgagataattatggttttataagattaaaagggatagtaaaaatatggtaatagtgagtatatttttatttttgttttttgagatatttgtaggtatttagaaatgttttagttgaattgtttttgaggtaataggtaattttttatgtgatgattaagaaaacgaatatttttattaagttgaatttttttttttttttttttgagacggagtttcgtattgttatttaggttggaatgtagtggtgcgatttaggttggagtgtagtggtgtaggtttaagtgattgttttgttttagttttttaagtagttggaattataacgcgtgttattatgttcggttaatttttgtatttttagtagagacggagttttattatgttggttaggttggtttttaatttttgattttaggtgatttggttgttttagttttttaaagtattgggattttaggtatgagttattgtgttcggttaaattgaaaaattaaatggttgatagaatgttgtatttttatgtttttttatttttagtattattgttgtttataaattaataaagataatcgattattatgttatatttttaaatttttaaaattagggtttttttttttttattttatttttaga

SEQ ID NO: 44 - DNA, 7304 bp, Artificial Sequence
  chemically treated genomic DNA (Homo sapiens)
tttgaaagtaaaataagaaaaaaagaattttaattttagagatttaaaagtgtaatatgataatcgattgtttttattaatttgtagataatagtgatgttaggagtggagaaatataaaaatgtaatattttattaattatttaattttttagtttggtcggatatagtggtttatgtttaaaattttagtattttgggaggttgaggtagttagattatttgaggttaggagttgaagattagtttggttaatatggtgaaatttcgtttttattaaaaatataaaaattagtcgggtatggtggtacgcgttataattttagttatttgggaggttgaggtaggataattatttgaatttgtattattgtattttagtttggatcgtattattgtattttagtttggatgatagtgcgagatttcgttttaaaaaaaaaaaaaaaaaaatttagtttaataaaggtattcgtttttttagttattatataaagaattatttattattttagaaataatttaattaaagtatttttgagtatttataagtgttttaggaagtagaaataaaaatgtatttattattattatatttttattattttttttggttttatgaagttataattatttcgtttttataaggtatataaattattttttagatgagaatgaaaatagatgttttaattgtttaaaataaggtataattttaagaagtatatatgtatgtattatttataataaaaattttttatggaaataattgatgtaaaaaatttatgtattattttaaattaatgagaataattatttaaggtataagtattttaaagaatatatttatgttttttcgattatataattttatttatttgatagtgtggtttgagaaaagaaaatggtaattataaaataagttggtgaagaaataatggtgaggatgatattatttattagtttgatatattagtgtttgatttgataagaatatgagttataaatatggggttaataaaagataatggtgatgatagtatttaggaaatgaaaattttattaagagtttgaatgttggaattagattgtttgggtttgtaaattttggtattatttattgtatgattttgggtaagttattttatttttttttttttgtttagatttttttcgtttataaaatgggaatgagacgatatatgtaaaaagtttggtagaatattaagattatttaaagtagttaatagttgttagtgattattattatttagggttttatattttttttttgaaaagttaatttgttgaagaaaaaagagtttattaaattttgggggatatagtttgcgcgcggtatgatttaaatagttaaggttgggtttacgagatttattttttagaggcgaattgaaatttttgtattttttattagtaagggtagtaatttaaaattttgttttattttttttagtgaatagtataggtttagatatgttatagagagatgtgtataataagtgattatcgttagttttatatttgtatgttttaggatgtagtggtttttatttgtaatgttttggaatatgaggttttgggtgttttagttaattacgtaagagaatattttttttatgtttttttaagatttcggggattttatttttttttttatttttagtgtttttagttttatataaaattttgtatttttgaaatttaatttttattttttggattttggaatagtaaaaattagataattaattttgattttagtattttttaatttagttagtatgaaaagttatttaagttttttaagatattagtttttttatttatatattgaatataataatttacgtaagcgggttgagggttaaatgagataatttttaaagtatttagtaggtattgttagaggaaaagtaattagtaaatgtttttacgattatagtttttttaattatttagataatttgtaagtggagtcgaggagtttttttacgttgtaaatatggacgtgggaggaagtagaatttaacggagattgggttgaaggtcgaggcgagagaacgaagattgaggcggcgttgacggcggtcggtgtgttttagtttgttattaggagtcgttatttttgttaagttcggagggttttatttttaggagttttttagtagtttggaatttcgtagatattagttttattcgtatcgttggagatagcgggaaatttattaaatttcgttgtattttaaagcggaacgttttttcgcgtatcgtaggtttatttgttaatttcggagtagttaaatttcgtacgttttcgttggggcgtgcggcgtgacgttagacgtaaagcggaaggggtcggttttgcggtttggtcgtacggggtttcgggttttgtagttttgcgtagttttgtaaatttttatatttatgtattatttcgttttgattttttaaaattttatttagagattttttattaaatgtatattttgattgtaaaacgatggacggagattataggacggagagttaggtttagtgggttttttacgttatatttttttgtttttatcgtggtttgttaggtgaagttttagagttattaataggaatgatttcgagtgggagtagtgagcgtaacgggtatatattagttagttattattattttggtgtgaaaagtttagggaataattattagaattaatttgcgtgttttttgtagagttgtagttttttggtttttttcgttgatcgttttttttttttgatttttttttttcgtaacgattatattgtttttttcgttttcgcgagggattgtgggttagtttttaacggtcgttgggagggattagttcgtatttttcgtatttatttacgttttttcgggagtcgtatttcgagtatggaggttattgagatcgttatttttttatggtttgtttagtttaagtagtagttggaaaagtaagtaattaatgtttttattagtgtgtttgggtttttggggttttgagaaggaggggttgggttatataagagttttttttgtggtatagatttgggaaggggtgtttaagtagtggtagtgatcgtttttaaattatagaatttcggggaggaaggtaagtagtttagaaggtggtttatgagttttttttttgtttaggtgagtgtaatttatttagtagggggtaatttattttttatttattggcgatttttttttttttttttttgagatagagttttattgtgttgtttatgatggagtgtagtggtacgatgtcggtttattgtaattttcgtttttcgggtttaagtgagttttttgttttagttttttgagtatttgggattataggcgtacgttattatgttcggttaatttttgtattatttttagagaaggggttttattatattggttaggttggtttcgaatttttgatttcgtgattcgtttgtttcggttttttaaaatgttgggagtataggcgtgagttatcgcgttcggttttgttggtaatgatttttagttttgatttttttttttagtttagaagaattttttaaatattgtaaattagagttttttatatatttagatttaaaaaaggaaataacgtatgttgagtattttagtaaattttatatattttaaatggttatagttatgttaaaaggaagataaggatatggaagtttagtatatagtttaatattaattttgataaaagaaaaaaagttggtcgggcgtagtggttcgtgtttgtaattttagtattttgggaggtcgaggtaggtggatttttttgagtttatgagtttgagattagtttcgataatatggcgaaatattgtttgtattaaaagtataaaaaattagtcgggtatggtggtatgtatcggtcgttttagttatttagaagtttgtggtgggaggatttttttagtttgggagtgagttatgattacgttattgtattttagtttgggtgatagagtgaaattttgttttaaataaataaaatattttagtatagtttttttaaagttaagatttaaatttagtattttttttattatttcgagttattaagattttgagtttttattggcggggagaatacgagaagtatttatattttatttggtaggttaaagaaagttttgtaggattggttaaaatgtggttggttatttaatttattgtttaatttttaatatggtttatatttgagcgtttagtggatgtataaatattatttttagggagattttatgtttatgtttataaagtatttagatttttgggtgaagaaaaaatatggtattattatatttaataataagtttttagttagtttggttaaatttagtggaattagtcgtgtttagaatttttttcgttgatagtggaaagtttaaaattattttggtttggtatagtggtttaagtttggaatttaagtattttgggaggttaaagagggtatatcgtttgattttaggagtttgagattagtttgggtaatagggtaaaattttatttttataaaaaatataaaaattagttagtatggtggtatatgtttttagttttagttatttgggaggttgaggtgggagaattaattgagttcgggaggttgaggttgtagtgagttgagattgcgtaattttattttaatttgggcgatagagcgagattttattttaaaaataaaataaagtaaaataaaaaaaataaaaaaatttttatttaattttatttatagttgtataatttaagtgttattaatattttttgtagattataaggttaggagatcgagattattttggttaatatgatgaaatttcgtttttattaaaaatataaaaaattagttgggtgcggtggtgggcgtttgtagttttagttattcgggaggttgaggtaggagaattgtatgaatttaggaggcggagtttgtagtgagtttagattacgttattatattttagtttgggcgatagagcgagattttattttagaaaaaaaaaaaaaaaaaattttttggtttttgtttataataattatttttattattatttttaagatgtttttaatgtaatttgttttgtagttatgtttttaaattgggatttaggtttttgaaattacgtattaggaattaaataaagttatgggataaatatggaaggtgtatttttttgtgtaattattttttttaaaaaaaattttttagggagggaagagttaaatgatttatttaagttatttgaaatggtttatattaagtagatattatatttgtgtagtgtggataaattattaaaatttttgaaaaagaaaataaattttaataaaatatggggtaggtcgggtacggtggtttatttttgtaattttagtattttgggaggttaaggcgggtggattatgaggttaagagattaagattattttggttaatatgacgaaattttgtttttattaaaaatataaaaattagttgggtatgttgatgtgtgtttatagttttagttatttaggaggttgaggtaggagaatagtttgaatttaggaggtagaggttgtagtgagtgagattaggttattgtattttagtttggaaatagagagagattttttttaaaaataaataaattagttgagcgtgatgttttacgtttgttttatagtattttgggaggtcgaggtgggcggattacgagattaggagatagattattttggttaatacggtgaaattttatttttattaaaaatataaaaaattagtcgggtgtggtggtaggtatttgtagttttagttatttgggaggttgaggtaggagaatggtgtgaattcgggaggtagagtttgtagtgagttaagattatgttattgtattttagtttttgtgatagagcgagattttattttaaaaaaaaatatatgtatagaaataaaaataaaatgtgggggtaaaatgtaaatataaaaataaaatttaagagaaaagtatgaggttagagatatattaggtttaaattggatattttagtaattttttaaatttttttcgggaatatgttttggttttttttgtaatttgaggttattttatgaaaaaatttgagagatattgttatgggtaaattagtatgggttgcggagttatatagatttggatttgtattatatgtttggaagttattaattatgtgatttttagtaagttatttagtttttttatttgtaagtagaagataatattttttggggttttggttaagattaaattaatatatatatagtatttattatataaaaaagtatataataaatttgagtttgttttttagtttttatagtattttaatgcgtatatttagttggaataaatttttatagaatatttagtttagtagaatgttaatgttgagacgttttttaaaaatgtttataattaggttagatattgtggtttatatttgtaattttattattttaggaggttgaggttggtagattatttgaggttaggagtttaagattagtttgggcgatgtggtaaaatttcgtttttattaaaaatataaaattaattgggggtggtggagggtatttatagttttagttatttggaaggttgaggtaggagaattgttggaatatgggaggtagagattgtagtgagtcgatattatgatattgtattttagtttgggcgataagaggaaaatttagttttaaaaataaaataaaataaaaaaagtttataattgtaaaagtgtcgaagtagagtatttttatatattttattttttttgatttgatttatagtaattttatgattggggtttatatttaggattagtattttgaagattagattattaaaataagattaaatattgattaaatgttagttatgtgttagatgatagggtaaataagatagattttttgtttttatggagtttataatttattaggatttttattgagtatttttgatatgttgtatttttgatttgtgtagttattttgatgtaattttaagggtaggaaggatttattgttgttaatgtttatagttaatttgttagagtattttaataacgagatatttttaggttgattaggttgtttttggagatataggagaggaataatatgaaatttttgttatagttggggagaagtttattttttttttagtttaagaatatagaattttaaaaaatggtgattacggtcg

SEQ ID NO: 45 - DNA, 19233 bp, Artificial Sequence
  chemically treated genomic DNA (Homo sapiens)
  unsure (76, 178..179, 273, 586, 648, 651, 920, 1014, 1173, 1197, 1228)
  unsure (1264, 1267, 1559, 1607, 1677, 1703, 1742, 1848, 1850, 2033)
  unsure (2168, 2254, 2257, 2280, 2291, 2723, 3018, 3080, 4205, 4209)
  unsure (4216, 4225, 4239, 4246, 4254, 4265, 4270, 4274, 4288, 4294..4295)
  unsure (4298, 4363, 4610, 4627, 4675, 4693, 4698, 4738, 4777, 4781)
  unsure (4787, 4825, 4829, 4838, 4855, 5462, 5494, 5496, 5500, 5674)
  unsure (5690, 5697, 5705, 5715, 5890, 5910, 5913, 6027, 6080, 6109)
  unsure (6244, 6288, 6776, 6873, 6891, 6980, 7028, 7656, 7876, 8030)
  unsure (8059, 8075, 8632, 8636, 9700, 9717, 9815, 9818, 9867, 9879)
  unsure (10005, 10075, 10150, 10159, 10165, 10356, 11123, 11166, 11360)
  unsure (11703, 11933, 12050, 12340, 12981, 13564, 13764..13765, 13787)
  unsure (13846, 14168, 16566, 17006, 17217, 17650, 17653, 17656, 17898)
  unsure (18130, 18143, 18151, 18188, 18498, 18549, 18936, 18946, 19165)
  unsure (19200)
gacggcgggagaggtttttttgggttggggggataggggagaggtaggggtattttagggagtagaaaagaggggntgtaagggagaggaaatgcggagatagtagtttttgtaatttgggtaaaagggtgagtggatgagagagggtagagggagttggggggataaggtcgatagnnnggatttagtgatttttaaattttattgtatcgacggaagaggttggaaaggtttttgaatgaagtgagtgggaaatagcggaggggcggttantggggaggaaaggggagttaagttgttgggtcgggtttgagtagtattttaagattggagttcgaggtaaggaggtttacgggagttgtttttattaagggtagttaggaaggcggtcgtttgtagtttagttttggtttttgttttttcggttttttgttatttttttaaaattagttggtgttgattgttaaggtaattttttagtattattaaatcgttggtttcggcgttttggttgagggttgggatggaggatagttgggtttttttagttagtttttatttattttttttggttacgtgagttaanggttgggcgattaatgaggttgtggttttcggtaaataatgattattatttaggtcggtagntgntatagggtatgggggtttagttgttagtgttggagataagggtcgttcgagatgaattttttttgttgtttgttaagttattgggaggggtaggttttagtaggatttttagaaatttcgtttttgtttagtttaggttttttattcggtgttagttaatttaacgttagtttttaggtttcgtggggttggagggtagggagttttatttttggggttgttgtttttggggtgtggggaagtgtaattttacggtattttgggttgantttatttagtttttaaagttttaggaaatattgtttggggttgggttattatgggtgggttagagaggattttttaatttttttcggagagttnaggggagggggaggtgtttttttttatgttattttcgaggtttattgttatgtggttgaaggttgtgcggttttgggaagagggggaggtggcggtggaggttgtttgttttttaattgggtttaatttgaaatatatgtattggtttgagttgatttngttttacgtggaggtaagattatnaaaagtttttgtgttttttgatgtgggtaanttgttagaaaataaggtttgattttggtttagtagnggnagggtatttatttttttttgagttttttttcgtttgttaggacgagagcggggtttggatattgttttttggataggatggtattattgtttgtggttgtagttagttagcggtcgtttgtttagtttatgagtaattattgtggatagggtattgcgtgtgtgttgaggggcgtttatgtagatttttacgtttgtttttttattgtttttgtagggtttttaattattttttttttttttttatttagatggtttgaagtggaggatttagatttgtcgttaatattttngggtttttgtgtttagttcggggttatttttggatttatgtttttttntttgttaggtttttttattttattttagtttatttatattgtgataattatttattatttgatttggggntttgggtttagattttgtaggtattnaagattaaagtcgtttttttaagtttatttgaattgtgnattttagtttttttaaatattatgttaggataatggttagggatggtggtttacgtttgtatttttggtattttgggatgttggtggattatttgagattaggatntnttaggttagtttggttaatacggtgaaattttatttttattaaaatataaaaattaattaggtgtggtggcgggtatttgtaattttagttatttaggagattgaggtaggagaattgtttgaattcgggaggtggaagttgtattgagttgagatcgcgttattgtattttagtttgggcgnataagagtgaaattttgttttaaaaataaaaaaaattatgtcgggatgagtttgtttttttttttaattttttatttgggttagaggaattagaattaataattttttttttagttttgttttttgtgtattttnattgaatttttggtttttaataaattagtttgtagaggtttaggggaggtaggtttttggtagttgggtggggttggttttagttnggngtggagattagttgtaggtttgngatggtggtgnaggtttttgttttgcgttgtagaaagttttttttgttgtttatacgaaagttttttttttgtatgttagggtagttacgtgtaagagtagttggttgggaacgtagaggtttgcggttcgaggcggggtttagaaagaaaattaggttgttttttgttgttcgttttgttttaagttgagtaaatttaaaggtaatttttttttatgttttacgatattgtttagtggattatttgatttaatttgaaggacgagagttaataattatataacgtttttttaaattttttgatttattttgttttgggaagttaaaaagtgtgtgtgttgtgtgggtggatgtttgtgtatataaatggataatgaaggatgatgtgttgggggttagggtaggggagataacgttgtttagattttatatttttttttttnttttttttttttttttgagatggagttttgttttgttgtttagtttggagtgtagtggcgcgattttagtttattgtaatttttattttttggatttaagtgatttttttgttttagttttttaagtagttgggattataggtatgcgttattatattcggttaatttttgtatttttagtagagatggggtttttttatgttggttaggatggttttaaatttttgattttaggtgatttattcgtttcggttttttaaagtgttgggattataggtttgagttattgcgtttnggtttttttttttttttttgagatggagtttttatttttgttgtttaggttggagtgtagtnggtgcgattttggtttattgtaatttttattttttaagtttaagtgattttttagttttagttttttaagtagttgggattataggtgtgtgttattatgtttggttattttattttattttattttatttatttatataagagattaagttttgttttgttgtttaggttggagtgtagtggtataatcggtttattgtaatttttgttttttaggtttaagtgatttttttgttttagttttttgagtaattgggattataggggtttgttattacgtttggttatttattgtatttttatataagattaatatttaatgttgtggaatttgatagcggataatgttataatgttgttttttttttttttttgagacggatttttatttttgttttttaagttggagtgtagtggtttgattttggtttatggtaatttttgtttttcgggtttaagtaatttttttgttttaatttttcgagttgttgcgattataagcgttcgttattatagaagtttagattgtatttttggtgatttttaggtagaggatgtaggtttttgttatggttggttagagttgggttttgaaatttttggatttttaggtgaattttcggttttcgttttttaaatcgcgattaaaataggtttaaattattataataagttcgatttagttttatagattcgtatatatatattatatcgttttagagaatttattataataattatgtattaaataagcgagtattttcgtataaagtttagcgtatagataaaatttatagaatgtcgtttggaatttattttagagtgttataattaatgtttatgttattggtattattttttatttttaatttagtcggtgatattgagatagaaataagatcgtagtatttaaatttattaacgttattttaagtatattaggaagtttaggataaaattatttttatttgatttttgtttgattttttaatttttaggtgttatttatttttttgtatttttgtatattgaataatttattgttattttcggtttgttaggttattttaattttttaatgttttggtataggttatttatgtttttcggattaattttattttnggtnttatggnagtttattntggaaaatttttantacgttntttcgatntcggtttaaantggtnattntttttcgggacggncgtttnntgnattttttagttgtgattttaatatttttggggtttgtattacgtttatttggaggtggggttatntgacggtataaagtgtttttatatattgtttttttttttaaggacgggggtcgggtttgattttttttcggagattttttatttttattttttatcgttacggtgttaagtttagggtttggaggcgggaagttagtttcgcgttgttggacgaatcgggttattattgcgattttatttagtagttgaggttttaaggaatagttttaattttttttgggatattaattcgtgtattcgttagagnatcgaggcgagaacgtntcgagaatcgtttagacgcgttcggaattgcgttttggattttttttntagcgatcgcgtagtttnttggngcgttttttggcgttattgttcgtttcgtatcgcgttcgncgtttcgcgttaggtttcgtttgggattatgggtgggtntatngtcggntgcgtttcggttaatgcggcggttgcgtagagatcggntttngtttttgangtcgcgcgtacgtcggngggcgggaacggtgcgcgtaatttttcgggttaataattgagtagcgcgcgggattcgggtggggaagttggagttgttgcggggttcgcggggaagttttggcggtggagttatggtcggttagttgagcgagggggttattgcggtgaggaggtatcgggggttgggtcggcggttcggggtggttgcggtttcgagtttcgcggagtagagagggggaggggagttcggggcgacgggggatgaacgcgaggggaggagatggcggggggaggtgggaaattcgtcgggcgtttttttagtgttatcgttttttttttaaagtattttttcgatcgtttttaaaatatgtttatattttttttacgtaagaataaattaaataaacgtttgtttttttttgtattttttatttgcggatattttttgtttttttttttttttttatttatagttaaattttttgtttggttttagttatttttttttttcgttttttattaattttttaatttattttagttatttttttgatcgttgtagaaaattttggttgaaggtattagtggtttttaagttgttaaatttagttttttttcgtttttnagtttatttgagtttttagtagcgtttgcgtntntaangttttgtttgttttaggttatatttttttttttggtttttagtggtttagtttggtaggtttattttcgttttatttgtaagtttttttttgtaaatttttgttgaattaaggttttttttaggtttttttgattttcgaggtaatttttttttttttttttagtttgggcgantatttattgtcgtttnaggttgngagtgtangaggcgcgantttcggtttattgtaattttcgtttttcgggtgtaagtgagttttttgttttagtttttcgagtagttgggattatatgtgtgcgttattatattcggttattttttgtgtttttattagagattgggttttattatgttggttaggttgatttcgaatattagattttaagttnattcgttcgtttcggttttnttnaaaatgttggaattataggtatgaattatcgcgtttggttttaaggtaattttattgttatttattaatatatgttagttgtttataaatttttttgtatagagttatttttanttttaaaagataaattttcgttatttgtttgtttattttatgttttagagggnttttaagtttagtatacgtattttaaagntaaattttttatttttttaagtttgggttttttgatttttatttttacggatggtattattatttatttagtttagtgttaattagaaattgagaaattattttttttatattgtttattatttgggtatttagnttttttacgaagtgaagtgtattttgtttttgcgtagatttatntaagtttattggtttttttttatttatattggtatcgtttttttttttgtttgagttgttgatttttatttagtatacgtttttgttattatttttatttatagtatatttttagtttatttttttagttatttttatatttttttttaaatttagatttttggtatattttatatttttatttttttttatggggtttttgaatttttttttttttttttgagttggaattttgttttgttgtttaggttggagggtagtggcgcgatttcggtttattgtaagttttgttttttgggtttacgttatttttttgttttagtttttcgaatagttgggattataggtattcgttattacgttcggttaattttttgtattttttagtagagacggggttttattatgttagttaggatggtttcgattttttgattttgtgattcgttcgtttcggttttttaaagtgttggggttataggcgtgancgattgtgttcggtttttttttttttttttttttttttttttgaggtagagttttattttttttttttatatttttttattatcgttttaggttggnagtgcggtggcgtaattntcggtttattgtaatttttgttttttgggtttaggtagttttcgtgtttttgtttttagagtagttgggattataggtatgtattattnatatttgcgtaattttttgtatttttagtagatacgggggttttattnatgttgtttaggttggttttgaatttttaattttaggtgatttatttttttcggttttttaaagtgttgggattatagaagtgagttatcgtattcggttttgaatatttttttttttttgtttattgtttgggtggttttttatttttttttatattggtaaatattattttcgtattttagtttatttgtgattttttttattaggttaaatttttttgagattttaatttttgtttatttatttattgaattatttattttttttttttttgagatggagttttgttttgttgtttaggttggagtgtagtggtacgattttgatttattgtaattttcgttttttgggtttaagtaattttttttttttagttttttaggtagttgagaatataggagattgttatgatgttcggttaatttttgtatttttagtagagatggggttttattatgttggttaggttggtttcgaatttttgattttaagtaatttatttgtttcggttttttagagtgttgggattataggcgtgagttatcgcgtacgattttatttatttattagatgtatgatttgaggtaagatattaaattgttttttttttgtaaaatgagagtaatngatatttattgtataaggtaagtaggaggatggagtgagttattaaatttaaagtgtttagtatattgatatatagtaaatgtttagtgtttatgttatttattaataattgtagttttatgtttgttgatttattagtttttttttaaaattttaaaattattgtgtttgtttgtttgtttgttttgagatagagttttgttttgttgtttatgttggnagtgtagtggtatattttcggtttattgtaatttttgtttttcgggtttaagcgatttttttgttttagtttttttagaagttgggattataggtgtttattattatattttgttaatttttgtatttttagtagagatagggtttcgttatgntaggttaggttggttttgaatttttggtnttcgagatttatttanttttggttttttagtatgttgggattataggtttgagttattgtgtttggtttaatattttgtgtaaattttatgaggtttgtaattatgtttgggttattttattttgtattgtatttttaatatttggagaagtgttggtaagttttaggtgttgaataaatgtttgttagttgtatgaatgaatgaggtagtgggaagaaagggataggtgaatggggaagaaaggtagtttgggggaaaaataggaataggaagaattattgttggatttaagtgaatatttaaataaattaggaatgtgtgaatgttgaaatcggggaagtgattttaaattgtagtttttatttattttatagttgttattttgtgtttttaagataaattaagaatgtttttaggttaggcgtagtggtttacgtttgtaattttagtattttgggaagttaaggtaggtagattatttgagattgggagtttgagattagtttggttaatatggagaaattttgtttttattagaaatataaaattagttaggtgtgggggcgtatganttgngaattttagttatttgggaggttgaggtaggagaattttttgaattcgggagatagaggtttcggtaagttaagatcgtattattgtattttagtaataagagtaaaattttattttaaaagaaaaaaagaaaagaatggttttttatttttaaaaagattgattatgggttaggcgtagtggtttatgtttgtaatttaagtattttaggaggttaaggtaggtggattatttgaggttaggagttcgagattagtttggttaatatggggaaattttggtttattaaaaatataaaattagttgggtgtgttggcgtgtgtttgtaatttttgttgtttgagagtttgaggtaggataattgtttgaattcgtgaggtagaggttgtagtgagtcgagattgtattagtgtattttagattgggcgatagagtgagattgttttaaaaaaaaataaagaatgattatggagatatttaaataatttgataagtttttttattttttagagatggggttttattttgttgtttatgttagttttaaatttttgggtttaagcgattttttcgttttagttttttaaagtgttgtgattatagatgtgagttattgtatttggttatgtttttatatttaaaattttataaatttatttttagcgtaggtgaagtattttgtttataaatgaagaatgaaagttttatatgtgtttgtggtgatggaatgagttggagaatttttgttgatttttattattagttaaagtaggtattattttcgtttaaaagatataggttataaagggtacgtaaatattatatatatgtgaaggcgtttgggtaagagttatatgataaaataagagatgatgtatagaatttttgtggttaatagaatatatagtatttgtattttaattatataacgaaaggggaagggaattaatgtttttgattatttttaatgtgatagatgttttagtagttagtatttaagtaattttagaagatagttattatatttttattttatagaggaaggaagtatagagaggttgaantaatgtgtttatggggntgaagatttgaatatatgtgtttttgagtattatatttgttgttttatatatttattagggattttttttttaaagggttttattttgttgtttaggnttnggggtgtagaagtataattttagtttattgtaatttttattttttaggntttaagtgattntttttgtttttgtttttcgattatagacgtgcgttattacgtttagttaatttttgtatttttagtagagatgaggtttcgttatgttgtttaggttggttttgaatttttggttttaagtgattntgtcgtttcggtttttttaagttttgggattatagatttgagttattgtatttggtcgtaattttttttnaaatgatagagttttgttttttgttttttaggttggagtgtagtggtatgattatagtttattgtaatttttaantttttgggntttaangtgatttttttattttaatttttttagtagttgggagtataggtgtatgttattatgtttagttaatttttttttttttttaattttgtgtagagatggggtttcgttattttgtttaagttggtttttaatttttggtttttaaatagtttttttgttttgttttttaagtttttgggattataggtatngagttattgtgtttggttttgttttttaaaatgagttatatttgtaaatagttgatttttttggagtatcgtttttatatattttttttttataagtgattttattttttttttatttaattttttttttgaatttgttgtttgttgttgtttttattttagtagaatttatgttgttttgataggggttttttttaaattgatgttttattttttttagtattttaaattaggttttgtttagatatgttataataagttagtatgagtttattttagtgtaaaaaaaatttttgaaatgtatgtatagtttttttataatgtatatttttcgtgtattttttgaattttttttatatatgtacgtggttttaaaattaaacggaatagaaaggtgtttatggtcgggtatggtggtttatatgtgtatttttagtatttggggaggttaatgtaggaggattttttgaggttaagaaagagtttgatattaggttgggtaatatagtaagattttgtttttattttatttagaaagaagaaagaaagaggtgtttaatgtaattattgattttttgttttattttgtttagtattgttttttagaataattgttttttagaaaaattattgttattgatattttgtttacgtatagtaaattgtattttttttatttatttatttatttatttgagatagagtttttttttgttattttggagtgtagtggcgtgattttagtttattgtaatttttgttttttnaggtttaagtagtttttatgttttagtttttttagtaattggnggttataggtgtacgttattatttggttaatttttgtatttttaatagtgatggggttttattatgttggttaggttggtttcgaatttttgattttagatgttttttttgttttggttttttaaagtgttgggattataggtataagttattatgttcggttaaattgtatttattttaaatgtatagtttgnatgaattttgataaatgtgcgtatttttgtaattatattgtttttgtggagatatagaatatttttattaacgtataattttttttgttttttttttatttttatttttattttaggtaattagtgttttggtttttatttttgtaggttagttttgttttttttaagattttatataaatggaattaaataatatttatttttttgtgtttggttttttttagtagttttttttttttttttagaggtagggtttttgttatttaggttggagtgtagcgatatagttatggtttattttagttttgattttttgaatttaagagattttcgtattttagtntttttgagtagttgggattataagtgtatgttattatttttggttaattaaaaaaaaatttttttttttttttttgagatatagttttgttttgttgttagattggagtgtagtggcgtaattttagtttattgtaatttttgttttttgggttgaagcgattttttttttttagtttttcgagtagttgggattatagtcgtatgttattatttttagttaatttttgntatttttagtagagacggggttttattacggtggttaggatggtttcgattttttgatttcgtgatttattcgttttagttttttaaagtgttgggattataggtgtgagttattancgttcggtttaaaaatattttttgtagcgatggagttttggtgtgttgtttaggatgattttgaatttttgggtttaagtgatttttttattttggttttttaaagtgttggggttataggtataagttattattgtggattaaaatggtttttgagatttatttatgttaatttagtaatttgtatttttttatggtttagtagtattttattgtatgattataataaaatttgtttatttatttattattgtatatttgggttatttttattttttggttattataanatgaagatgttatgattatttaagtataattttttttgtggaaatatgttttcgtttttttgggataaatatttaggaatgtaattgttgggttataggtaattgaatgtgtaaaagaaatcgttaattttttttagtgtgattatgagaattttagttgttttatatttttgttagttattagtttttgatttcgagtattttagtgaatgtgtaatggtattttattgtgtttttatttgtatttttttggtggttagtgacgttgagtattttttcgtgggtttattggttatttgtatatttttacgaaagaagtgtttgtttatattttttgtttatttaaaaattgggttttgtgtttattaatgagttgtgagaatttttgatttttgttaggttttttgttaaatataaatattatatatatttttttttaatttgtgatttgtttttttttttttgaaattttgttttttttgaagtgtatttttaaatttttatgaagtttaagttattaggttgtgtttttttgtttgtttttgttttgttttttgtagagttgtgtttgtgtgttttaagaaatttttgttaggttggatgtggtggtttatgtttgtaattttagtattttgggaggnttgaggcgggcggattatttgaggtcgagagttcgagattaatttggttaatatggagaaatttcgtttttattaaaaatataaaattagttgggcgtggtggtaggtatttgtagttttagttattcgggaggttgaggcgggagaatggcgtgaattcgggaggcggagtttgtagtgagttaagatcgtattattgtattttagtttgggtaatagagtaaaatttcgttttaaaaaaataattaaataaataaaataaaaatatttagggtgtagtcgttaacgtttgtaattttagtattttgggaggtaaagtcgggtagaatatttgaggttaggagttcgagattagtttgattaatatggagaaatttcgtttttattaaaaatataaaattagtcgggcgtggtggcgtatgtttgtaattttagttatttaggaggttgagttaggagaattatttgaatttaggaggtggaggttgtggtgagttaagatcgtattattgtattttagtttgggtaataagagtgaaatttagttttaaaaaaaaaaaaaaaaagaaatttttgtttattncgatttaaggttataaattttttatgttgtgtttttttttagaagttttatagttttcgttttgttttgtggtttgtaatgtattttaagtttattattttatttatgatatatagtttttttttaaatatagatatttagttgttttagttttgtttattgaaaatattattttattttattgagttatttagttattnntgatttatttatttttttaatntttaaatttttgagatggagtttcgttttgttatttaggttggagtgtagtggtacgantttcggtttattgtaagttttatttttcggatttatagtatttttttgttttagtttttcgagtagttgggattataggtattcgttattatgttcggttaatttttttttgtatttttagtagagacggtattttatcgtgttagtcgggatggttttaattttttgatttcgtcgtgatttatttgtttcggttttttaaagtgttgggattataggcgtgagttattcgcgttcggttttttagttattttatataaaattaacggattgtatatgtgtatttgtttttggaatgttaattgatttttaagtcggtgtnttatgttaatattatattattataaatattgaagatttatagtaaattttgaaatttggtattgtaaacgtattagttgtatttttatgtagaacgttgagatttagtatgagaaggagtttagttttgttattaggttggagtgtagtggtgagatttcgtttttttgtatttttttattttgggcgaaagtcgatttttttgttttagtttttttagtagttgggattataggtatgcgttattaacgtttatgttaatttttaaatttttagatggaaatagggttttattatgttggttaggttggttttaaatttttgattttaattgattttggcggtaaatgttttcgatttggttggatgataagttattttgtgtcgtttagttttttgttaatttttatgatttgttttgcgttgttttattgcgttagtgagaatttttaatagttaatggaatagtgcgtggaattatggtatacgtcggttttattttcgattttagtaggagtattattgtttttttattgtttcgtgagagggtgacggtcgatttttgtttgagatcgttagtttttacgtttaaggtattattttttatgtttagtttgttgcgatttttttattttgaggcggggtttcgttcggatgtatatattggatgatgattgcgttttattttttggaggtgatatagtatattcgagttgttagatgttgaggaaatcgtgatttcgtcggataaattatatttggataatatgtgatgaggtattatttagtatgtacgagtgcggtacgtgattttgttattatattggtttaagagttttggtttttaatagagtcgggttaagcggcgtaggtcggcgttgttcgttagggtttttagtagtttatttttcgtcggttttgttaagtgttaggatttattaataacggttatttgagttttaatttaatgttttttttttatagaatttttttttattattttaaaatgtttaaataaggttaggtttggtggtttatgttcgtaattttagtatttagggaggtcgaggtgggtagatgatttgagtttattggttttgttttattttttgttttttttgtttgggagtgtgtttttttttgttaggttggagtgtagtggtgtgattttagtttattgtagtttttgtttttcgggtttaagtgatttttttgttttagtttttcgagtagttgggattataggtattcgttattatgttcggttaatttttttttgtatttttagtagagacggtattttatcgtgttagtcgggatggttttaattttttgatttcgtcgtgatttatttgtttcggttttttaaagtgttgggattataggcgtgagttattgcgttcggttttttagttattttatataaaattaatggattgtatatgtgtatttgtttttggaatgttaattgatttttatgttggtgtttatgttaatattatattattataaatattgaagatttatagtaaattttgaaatttggtattgtaaattttttagttttatttttattttttattttttattttttttgagatggagtttagttttgttattaggttggagtgtagtggtgagatttcggtttattgtaatttttatttttcgggtttaagcgatttttttattttagttttttgaatagttgggattataggtgttcgttattatatttagttaatttttatatttttagtagagacggggttttattatgttggttgggttagttttgattttttaattttatgtgattcgtttgttttgggtttttaaaatgttgggagtataggcgtgagttatcgtgtttggtttttagttttatttttttttttttttgagataggattttatttagttatttaagttggagtgtagtgatatatatgattatagtttattgtagttttatttttttggtttaagtgattttttttttttattttttgagtagttgggacgattgcgtttagttagtttttttttttttttttttttttttttgagatagggttttattattatttaggtagagtatagtggtgttattttattttattgtagtttttgttttttagatggaaataatttttttgttttagtttttcgagtagttgggattataggtatgtgttattatatttaattattttttgtattttttgtagagacggggttttattatgttggttaggttggtttcgaatttttgattttaagcgatttttttgttttagttttttaaagtgttgatttttttgtatatattgaagtatagagaaataaagtataataaaaaaaaagaaaaagaaaatgaaaatagacgtttgtttgtnttgttttgagatagggttatgttttgttatttaggttggagtgtagtggtgtaattatagtttattatagtttagattttttgggttcgagtgatttttttttagttttttgagtagttgggattataggtgtgtattatatatttggttaattttttttgagatggattttttttgtgttgtttaggttggagtgtagtggcgcgattttagtttattgtaattttcgttttttaggtttaagtaatttttttgttttagttttttaaatagttgggattataggtacgttttattacgttcggttaattttttatatttttagtagagatagggttttatcgtgttagtcgggatggttttaattttttgatttcgtgatttttttattttggttttttaaagtgttaggattataggcgtgagttattatttggttnaattttttatagagataggtttttttttgttgtttcgattggtttcgaatttttgagtttaagcgatttttttgttttcgttttcgaaatgttgggattataggtaagagtcgtcgtttgtagttttgttggtagttttcggtgtgtagtttttatatatgtatattgttaaatatatttttaaataatttatttttgaagtttggtacgngtggtttacgtttgtaattttagtattttttgggaggttgaggcgggtagattattagaggttaggagtttgagattagtttggttaacgtagtgaaattttgtttttattaaaaatataaaaattagttaggtgtggtggtgtatgtttgtaattttagttacgcgggaggttgtagtaggagaattgtttgaattcgggtattagaggttgtagtgagttgagattgtattattacgttttagtacgatagagcgaaatttcgttttaaaaaaaataaaataaaataaagaaagtttttttgatggtgtttaagtggtatttttgaaaattttattttttagttgtttattgttagtatattgaaatataagtgattattttatattagttttgtgttttgtaaatttgttaaattaatttattagttttntantangatattttaggattttttatgtaaacgattatattgtttataaataaaggaagttttatttgtttttttttaatttttttattttttattttgagagggagttttattttgtcgtttaggttggagtgtagtggtgcgattttagttttttgtaattttcgttttttgggtttaagcgatttttttgttttagtttttttagtagttgggattataggtatgcgttattacgtttagttaantttttaaatttttgatggaaatagggttttattatgttggttaggttggttttaaatttttgagtttaagtgatttgttcgttatagtttttcgaagtgttgggattataagttattttgtttagttagtttttttttaatttttatgatttttttttttttgttttattgtattagttagaatttttaatattatattgaataaaggtgttaagaggtatatttttgtttntattttcgatttntagtagtnatattattgttttttattgttaagtgtgatggtaatncgtagattttttttgtagacgttagttattagtttaagtattatttttatgtttagtttgttgagattttataatgagtaagtgttgtttttttcgtatttatttagttgatgatgatttttttttattttttggatgtgataaattatattgattttttagatgttgagtaaattttgttttttttggataaattatatttggataatatgttatgatatattatttattttatatagtgttggatttgatttgttattattttgttgaagatttttttttttaaatagagtttcgttatgttgtttanggttggttttgaatttttgggtttaaagtagtttttttatttcggtttttntaaagtgttaggattataggtatgaatttttgtatggggtggtttttgtttttttttttgtcgtagtaaatttaatattataaaatgatttggaaagaaagtattgttttttttattttttgaaataatttatgtaagtttttttgtttgtttgtttttaaatgttagataggatttattaataaagttatttggatttagagggtttttttttggaatatttagaattataaatttaatttttttaatagatatagagttatatagatttttttttgtattagttttgataatttgtattttttgagggatttatttattttattttggttgtttaataaagttgtttttaatatttttttattatttttttaatgtatataggantttatttatnttaattttttgttaatgagtattagagggaaatgaatggttgttaggaataacgagtatatatgggatatcggtgttagagatgtgttaagtgtttttttgtaaaatacgtattttttttttattattttatgatttgtttagagtgataaattagatgttttagttgataggttttgaataggtttttttaataattttatttatatattttaaatanttaattataaaaatatgttatttttattatgattntgagtgcgtattttatataaatttgtttttatt

SEQ ID NO: 46 - DNA, 19233 bp, Artificial Sequence
  chemically treated genomic DNA (Homo sapiens)
  unsure (34, 69, 288, 298, 685, 736, 1046, 1083, 1091, 1104, 1336)
  unsure (1578, 1581, 1584, 2017, 2228, 2668, 5066, 5388, 5447, 5469..5470)
  unsure (5670, 6253, 6894, 7184, 7301, 7531, 7874, 8068, 8111, 8878)
  unsure (9069, 9075, 9084, 9159, 9229, 9355, 9367, 9416, 9419, 9517)
  unsure (9534, 10598, 10602, 11159, 11175, 11204, 11358, 11578, 12206)
  unsure (12254, 12343, 12361, 12458, 12946, 12990, 13125, 13154, 13207)
  unsure (13321, 13324, 13344, 13519, 13529, 13537, 13544, 13560, 13734)
  unsure (13738, 13740, 13772, 14379, 14396, 14405, 14409, 14447, 14453)
  unsure (14457, 14496, 14536, 14541, 14559, 14607, 14624, 14871, 14936)
  unsure (14939..14940, 14946, 14960, 14964, 14969, 14980, 14988, 14995)
  unsure (15009, 15018, 15025, 15029, 16154, 16216, 16511, 16943, 16954)
  unsure (16977, 16980, 17066, 17201, 17384, 17386, 17492, 17531, 17557)
  unsure (17627, 17675, 17967, 17970, 18006, 18037, 18061, 18220, 18314)
  unsure (18583, 18586, 18648, 18961, 19054..19055, 19158)
agtaaaaataggtttgtgtgagatacgtatttanaattatgatgaaaatgatatgtttttatagttggntatttggaatatatagataagattgttaaaagagtttatttagagtttgttagttgaagtatttagtttattattttggataaattataaaatgataagagggagatacgtgttttataaggaaatatttagtatatttttagtatcggtattttatatgtattcgttatttttaatagttatttatttttttttagtgtttattaatagggaattagnataaataaanttttatatatattaaagagataataagggagtattaggaataattttattaaataattaagataaagtggataaattttttaaaaaatataaattattaaaattgatataaaagaaaatttatatagttttatgtttattaaagaaattgaatttataattttaaatattttaaaagagaattttttaggtttagatggttttattggtgaattttatttaatatttaagaataaataaataaaaaaatttgtataaattattttagaaaatagaaaagataatattttttttttaagttattttatgatgttaggtttattacgatagaaaaaaaaataaagattattttatgtagaggtttatgtttataattttagtattttgnggaggtcgaggtgggaggattgttttgagtttaagagtttaagattagttntaagtaatatagcgagattttgtttaaaaaaaagaatttttaataaaataatagtaaattaaatttagtattatataaaatggataatatgttatgatatattatttaagtgtgatttatttaaggaaggtaaggtttatttaatatttgaaaaattaatgtaatttgttatatttaaagaatagagaaaaattattattaattgaatagatacggaaaaggtaatatttatttattataaagttttagtaaattaggtatagaagtaatgtttaaattgatagttgacgtttataaaaaaaatttacgngttattattatatttaatagtaaaagataataatatngttattanagatcgggaatanaggtaaggatatattttttaatatttttatttaatgtggtattagaggttttaattaatgtaatagggtaagggaaaaaaagttataaagattaaaaaggaattggttgggtaaggtggtttgtaattttagtatttcgggaggttgtggcgggtaaattatttgagtttaggagtttgagattagtttggttaatatggtgaaattttgtttttattaaaaatttaaaaanttagttgggcgtggtggcgtatgtttgtaattttagttgttggggaggttgagataggagaatcgtttgaatttaggaggcggaggttgtagggagttgagatcgtattattgtattttagtttgggcgatagagtgaggtttttttttaaaataaaaaataaaaagattaaaaaggaatagataaaattttttttatttgtagataatatgatcgtttatatagaaaattttaaggtattntantanaaaattagtaagttgatttagtaagtttgtaggatataaggttggtgtggaataattatttgtattttaatatattagtaataaataattgaagaatgaaatttttaaaaatgttatttaaatattattaaaagaattttttttattttattttattttttttgagacggagtttcgttttgtcgtgttagagcgtggtggtgtaattttagtttattgtaatttttaatgttcgggtttaagtaatttttttgttgtagtttttcgcgtagttggggttataggtatgtattattatatttggttaatttttgtatttttagtagagatagggttttattacgttggttaggttggttttaaatttttgatttttggtgatttgttcgttttagttttttaaaaagtgttgggattataggcgtgagttatncgtgttaggttttaaaagtaaattatttagggatatatttaatagtatatatatgtaagaattgtatatcgaaaattattaataaggttgtaaacggcggtttttgtttataattttagtatttcggagacggaagtaggaggatcgtttgagtttaggagttcgagattagtcggggtaatagaaggagatttgtttttataaaaaattnagttaggtggtggtttacgtttgtaattttagtattttgggaggttaaggtgggaggattacgaggttaggagattgagattatttcggttaatacggtgaaattttgtttttgttaaaaatataaaaaattaatcgggcgtggtgggacgtgtttgtagttttagttatttgggaggttgaggtaggagaattgtttgaatttgggaggcggaggttgtagtgagttgagatcgcgttattgtattttaatttgggtagtatagaaagaatttattttaaaaaaaattagttaggtatgtggtgtatatttgtagttttagttatttagaaagttgaggaagaattattcgagtttaggaggtttaggttgtagtgagttgtgattgtattattgtattttagtttgggtgataaagtatgattttgttttaaaataanataaataaacgtttgtttttattttttttttttttttttttattgtattttgtttttttatattttagtgtatgtaaagggattagtattttgggaggttgagataggaggatcgtttgaggttaggagttcgagattaatttggttaatatggtgaaatttcgtttttataaaaaatataaaaagtagttgggtgtggtggtatatgtttatagttttagttattcgagaggttgaggtaggaggattgtttttatttgggaagtagaggttgtagtaaggtgagatggtattattgtattttatttgagtgatagtaaagttttgttttaaaaaaaaaaaaaaaaaaaaaaaaaaattagttgggcgtagtcgttttagttatttagagggtgaggagggaggattatttgagttagggagataaagttgtagtaaattatgattatgtatgttattgtattttagtttggatgattaagtgagattttgttttaaaaaaaaaaaaaaatgaagttagaggttaggtacggtggtttacgtttgtatttttagtattttgggagtttaaggtaggcggattatatgaggttgggagattaagattagtttagttagtatagtgaaatttcgtttttattaaaaatataaaaattggttgggtgtggtggcgggtatttgtaattttagttatttaggaggttgaggtaggagaatcgtttgaattcgagaggtggaggttgtagtgagtcgagattttattattgtattttagtttggtgatagagttagattttattttaaaaaaaataaaaaataaaaaataaaaatgaagttggagaatttataatgttagattttaagatttattataaatttttaatgtttatgatgatgtggtattgatataagtattaatatagaaattaattgatattttagaaatagatatatatatatagtttattgattttatataaagtgattaaggggtcgggcgtagtggtttacgtttgtaattttagtattttgggaggtcgaggtaggtggattacgacgaggttaggagattgggattatttcggttaatacggtgaaatatcgtttttattaaaaatataaaaaaaaattagtcgggtatggtggcgggtgtttgtagttttagttattcgggaggttgaggtaggagaattatttgaattcgggagatagaggttgtagtgagttgagattatattattgtattttagtttgatagaaagaaatatatttttaaataaaaaaaataaaaaatagaatagaattaatgaatttaggttatttgtttatttcggtttttttaagtgttgggattacgggtatgagttattaggtttggttttatttaggtattttagagtggtaagggagaattttgtgaggagggggtattgaattgagatttaggtgatcgttgttgataaattttaatatttggtaggatcggcgagaagtggattgttaagagttttggcgggtagcgtcggtttacgtcgtttagttcgattttgttgaaagttaagatttttggattaatataatagtaggattacgtgtcgtattcgtgtatattgggtgatattttattatatattatttaagtgtgatttgttcggcgaagttacggtttttttaatatttgataattcgggtgtattgtgttatttttaaagaatagagcgtaattattatttagtgtgtgtattcgggcgagatttcgttttaggataagaaagtcgtagtagattgggtatagaagataatgttttaagcgtgagagttgacgattttagataaaaatcgatcgttatttttttacgaaatagtagaaagataatgatatttttattaagatcgggaataaggtcggcgtatattatagttttacgtattattttattggttattagaggtttttattaacgtaatagggtaacgtaaaataagttataaagattaataaggaattgaacggtataaggtggtttgttatttagttagatcgggagtatttgtcgttaagattaattgagattaggagtttgagattagtttgattaatatggtgaaattttgtttttatttaaaaatttgaagattagtatgggcgttggtggcgtatgtttgtaattttagttgttggggaggttgagataggagaatcggttttcgtttagagtgggaggatgtagggagacgagattttattattgtattttagtttggtgatagagttagatttttttttatgttaaattttaacgttttatataaaaatgtagttggtgcgtttataatgttagattttaagatttattataaatttttaatgtttatgatgatgtggtattgatataangtatcgatttagaaattaattgatattttagaaatagatatatatatatagttcgttgattttatataaagtgattaaggggtcgggcgcgagtggtttacgtttgtaattttagtattttgggaggtcgaggtaggtggattacgacgaggttaggagattgggattatttcggttaatacggtgaaatatcgtttttattagaaatataaaaaaaaattagtcgggtatggtggcgggtgtttgtagttttagttattcgggaggttgaggtaggagaatgttgtgaattcgggaggtggagtttgtagtgagtcgagantcgtgttattgtattttagtttgggtgatagagcgaggttttattttaaaaatttaaanattaaaaaaataaataaattannagtgattaagtaatttaatgaaatgggatagtgtttttaataaatagggttggaataattgaatatttgtatttaaaaaagagttatatattatagataaaatagtaaatttgaaatgtattatagattataaggtaaagcgaaaattataaaatttttggaagaaaatatagtataaaagatttgtgattttgggtcgnggtaggtaaagatttttttttttttttttttttgagattgagttttatttttgttgtttaggttgaagtgtaatggtgcgattttggtttattataatttttattttttgggtttaagtaatttttttgatttagttttttgagtagttgaggttataggtatgcgttattacgttcggttaattttgtatttttagtagagacgggatttttttatgttggttaggttggtttcgaatttttgattttaggtgttttgttcggttttgttttttaaagtgttgggattataggcgttagcgattgtattttgggtgtttttattttatttatttaattatttttttgagacggagttttgttttgttgtttaggttggagtgtagtggtgcgattttggtttattataagtttcgtttttcgggtttacgttattttttcgttttagtttttcgagtagttgggattataggtgtttgttattacgtttagttaattttgtatttttagtagagacgggatttttttatgttggttaggttggtttcgaattttcgattttaggtgattcgttcgttttagnttttttaaagtgttgggattataggtatgagttattatatttagtttagtaaagattttttaggatatataaatataattttgtaaaaaataaaataaaaataaataaaaaaatataatttgataatttggattttatgaaaatttaaaagtgtattttaaaaaaaataaaattttaaaaaagaaaaggtaagttatagattgggaaaaaatatatgtaatatttatatttaataaaagatttagtaagaattaagaatttttataatttattaataagtataaaatttaatttttaggtgaataaaagatgtgaatagatatttttttcgtgaagatatataaatggttagtaagtttacgaaaagatgtttaacgttattagttattagagaaatataaataaaagtatagtgagatattattatatatttattagaatattcgaaattaaagattgatgattggtaaggatatggagtaattagaatttttatgattatattggaaaaggttggcgattttttttatatatttagttatttgtgatttagtaattatatttttagatatttattttagagaaacgaaaatatatttttataaaaagagttgtatttaaatggttatagtatttttatnttataatagttaaaagatgaaaataatttaaatgtgtaataataagtaaataaataaattttgttatagttatataatggaatattattgagttataaaaaggtgtagattattgaattaatatgggtaaattttaaaaattattttggtttatagtggtggtttgtgtttgtaattttaatattttgggaggttaaggtgggaggattatttgagtttaggagtttaagattattttggataatatattaagattttatcgttataaaaaatatttttaggtcgggcgntggtggtttatatttgtaattttagtattttgggaggttgaggcgggtggattacgaggttaagagatcgagattattttgattatcgtggtgaagtttcgtttttattaaaaatantaaaaattagttggggatggtggtatgcggttgtaattttagttattcgggaggttgagggaagagaatcgttttaatttaggaggtagaggttgtagtgagttgagattgcgttattgtattttagtttggtaatagagtaagattgtgttttaaaaaaaaaaaaaaaaatttttttttaattagttaagagtggtggtatgtatttgtagttttagttatttaggagngttgaggtgcgaggattttttgagtttaggaggttaaggttggagtgagttatgattgtgtcgttgtattttagtttgggtgatagagattttatttttggggaaaaaaaaaaaattgttgaaagaagttagatataaaaggatagatattatttgattttatttatatgaagttttaggaaaggtaaaattaatttataaaggtagaaattagaatattggttgtttagggtgaggatggaggtggggaaggagtaagaggagttgtgcgttgatggaagtattttatatttttataggggtaatgtggttataggggtgcgtatatttgttaaagtttatntaagttgtatatttaaaataggtgtaatttggtcgggtatggtggtttatgtttgtaattttagtattttggaaggttaaggtaggaggagtatttgaggttaggagttcgagattagtttggttaatatagtgaaattttattattattaaaaatataaaaattagttaggtggtggcgtgtatttgtaattnttaattattaaggagattgaggtatgagaattgtttgaatttngggaggtagaggttgtagtgagttgagattacgttattgtattttagggtgataggaggaaattttgttttaaataaataaataaataaataaaaaaggtgtaatttattatacgtaagtaaaatgttaatgatagtgatttttttaaaaagtagttattttggggaatagtattggataaggtaaggtaggaggttagtaattatattaaatattttttttttttttttttttaaatgaaatagagataggattttgttatgttgtttagtttggtattaaatttttttttggttttaagggatttttttgtattagtttttttaagtgttgagagtatatatgtgagttattatgttcggttatgaatatttttttgtttcgtttgattttaaaattacgtgtatgtatgagggggatttaaaaagtatacgaaaaatgtgtattatgaaaaaattatgtatgtattttaaaaattttttttgtattaaaataaatttatattaatttgttataatatgtttgaataagatttagtttgaggtattaagaaggataagatattagtttgaaaagagtttttattagagtaatatgaattttgttaaaatggaaataataataaataataaatttaaggggaaggttgggtggaagaaggatgagattatttatgaaagaaaagtatatggggacgatgttttaaagaaattagttgtttataaatgtaatttattttaagggataaggttaggtatagtggtttnatgtttataattttaaagatttgggaggtaaggtaggagaattgtttggagattaagagttagagattagtttaggtaagatggcgaaattttatttttatataaaattaaaaaaaaaaaaaaattagttgggtatggtggtatgtatttgtatttttagttattggagaggttgaggtggaaggattatnttgagntttaggagnttggaggttgtagtgagttatgattatgttattgtattttagtttgagagataaagaataagattttgttatttnaaaaaaaattacggttaggtgtaatggtttaagtttgtaattttaggatttggggaagtcgaggcggtangattatttgaggttaggggtttaagattagtttggataatatgacgaaattttatttttattaaaaatataaaaattagttgggcgtggtggcgtacgtttgtaatcgagagatagaggtaaaagnaattatttgaantttgggaggtgaaggttgtagtgagttgagattgtgtttttgtattttnagntttgggtaatagagtgagattttttaaaaaaaaaatttttagtaagtatataaagtaataaatgtaatatttaagggtatatgtgtttaaatttttanttttatggatatattantttaatttttttgtattttttttttttgtaaaatgggagtataatagttattttttagggttatttaagtattgattattaaagtatttgttatattagaaatagttaaaaatattagttttttttttttttcgttatataattaagatataaatgttatgtattttgttgattataagagttttatgtattattttttattttattatgtgatttttgtttaaacgtttttatatgtgtgtggtatttgcgtattttttgtggtttgtgttttttgaacgaaaatgatatttgttttagttgataatgaaagttagtaaaggttttttaatttattttattattataaatatatgtgaaatttttattttttatttatgaataaaatattttatttacgttggaaataggtttataaaattttgaatataaaaatatggttaggtgtagtggtttatatttataattatagtattttgggaagttgaggcgagaggatcgtttaagtttaggagtttgagattagtatgggtaatagagtgagattttatttttaaaaaataaaaaaatttattaaattatttaaatatttttatgattattttttatttttttttgagatagttttattttgtcgtttagtttggaatgtattggtgtaatttcggtttattgtaatttttgttttacgggtttaagtaattattttgttttaggtttttaagtagtagggattataggtatacgttaatatatttagttaattttgtatttttagtagattagggtttttttatgttggttaggttgatttcgaatttttgattttaagtgatttatttgttttggttttttaaagtgtttagattataggtatgagttattgcgtttggtttatgattagtttttttaaaagtgaagaattattttttttttttttttttttgagatggagttttgtttttgttgttggagtgtaatggtgcgattttggtttatcggaatttttatttttcgggtttaagagatttttttgttttagttttttaagtagttgggatttntagnttatgcgtttttatatttggttaattttgtatttttaatagagatagagtttttttatgttggttaagttggttttaaatttttaattttaggtgatttgtttgttttggttttttaaaatgttgggattataggcgtgagttattgcgtttggtttagaaatatttttaatttgttttaaagatataaggtagtagttataaagtaaatgaaagttataatttaaaattattttttcggttttagtatttatatatttttaatttatttaaatatttatttgagtttaataatagttttttttgtttttgttttttttttaagttgttttttttttttatttatttgtttttttttttttattgttttatttatttatgtaattagtaagtatttatttagtatttaaaatttgttagtatttttttaggtattggggatataatgtagagtaaaataatttagatatgattgtaggttttatggaatttatataaagtattaggttaggtatagtggtttaagtttgtgattttagtatattgggaggttaaggntgggtggatttcgagngttaggagtttaagattagtttggtttantatggcgaaattttgtttttattaaaaatataaaaattagtagggtgtggtggtgggtatttgtaattttagtttttagggaggttaagataggagaatcgtttgaattcgggaggtagaggttgtagtgagtcgagaatgtgttattgtattnttagtatgggtaatagagtaagattttgttttaaaataaataaataaataaatataataattttaaaattttaaaaagaaattgataaattaataaatataaaattgtaattattaataggtaatataaatattgagtatttattatgtattagtgtgttaagtattttaaatttaataatttattttatttttttatttattttatgtaatagatattnattgtttttattttatagaaaagaaatagtttagtattttgttttaagttatgtatttaataagtgaatggggtcgtgcgcggtggtttacgtttgtaattttagtattttgggaggtcgaagtaggtggattgtttgaggttaggagttcgagattagtttggttaatatggtgaaattttatttttattaaaaatataaaaattagtcgggtattatggtagttttttgtatttttagttatttgggaggttgagggaggagaattgtttgaatttaggaggcggaggttgtagtgagttaagatcgtgttattgtattttagtttgggtaatagagtaagattttattttaaaaagaaaaaaaataaataatttaataagtgaatgaataggaattggggttttaaagggatttagtttagtaagggaagttataaatgagttgagatacgaagatagtgtttgttagtgtggggaagagtgaagaattatttaggtagtgggtagagggaaaaaaatgtttagggtcgggtgcggtggtttatttttgtaattttagtattttgggaggtcgaggagggtggattatttaaggttgggagtttaagattagtttgggtaatatnggtgaaattttcgtgtttattaaaaatataaaaaattacgtaggtgtnggtggtatatgtttgtaattttagttattttggaggtagaggtacgagaattgtttgaatttagaaggtagaggttgtagtgagtcgangattgcgttatcgtattnttagtttggggcggtagtgggggggtatggggagaaagagtgagattttgttttaaaaaaaaaaaaaaaaaaaaaaaaaaaggtcgggtatagtcgnttacgtttgtaattttaatattttgggaggtcgaggcgggcgaattataaggttaggagatcgagattattttggttaatatggtgaaatttcgtttttattaaaaaatataaaaaattagtcgggcgtggtggcgggtatttgtagttttagttattcgggaggttgagataggagaatggcgtgaatttaggaggtagagtttgtagtgagtcgagatcgcgttattgttttttagtttgggtaatagagtaagattttagtttaaaaaaaaaaaaaaaagtttaaaggttttatggaagaaggtaggagtatggaatatattagaaatttaaatttaaaaaaaaatgtgggggtgattggagaggtaggttgagagtatgttgtggatgggaatggtggtaggaacgtatgttgagtggaagttagtagtttaggtaaaaaaaaagacggtgttagtatggatggagagaagttagtgggtttgnatagatttacgtagaggtaaaatatattttatttcgtgaggganttggatgtttaggtaatggataatataggaggaatgattttttaatttttggttagtattgaattgaatagataatggtgttattcgtggagatagggattaagaggtttagatttagaaagataaagaatttgnttttgggatacgtatattgaatttaaaanttttttgaagtatggaataagtagatagatgacggaagtttgttttttagagntaaaggtggttttgtataaagaaatttgtgagtaattgatatatattaatagatggtaatggaattgttttggggttaggcgcggtggtttatgtttgtaattttagtattttnggngaggtcgaggcgggcggatnaatttgaggtttggtgttcgagattagtttggttaatatgatgaaatttagtttttaataaaaatataaaaagtagtcgagtgtggtggcgtatatatgtagttttagttattcgggaggttgagataggagatttatttgtattcgggagacggaggttgtagtgagtcgagantcgcgttttntgtatttntagtttngggcgatagtgagtgntcgtttaggttggagaaaaaaaaagaaattgtttcgggagttaagagggtttagagggagttttgatttaataaaaatttataaagagggatttataaataagacggggatagatttgttaagttgagttattaaaaattaaggaagagggtgtgatttgaagtaagtagggtnttananacgtaaacgttgttgagaatttaggtaagttngaaaacggaaaagggttggatttagtaatttggaggttattggtatttttagttagggttttttatagcgattaaagggatgattggagtgggttaaagagttgatgaaaggcgaggaaaggaagtggttgaaattagataagaagtttggttgtgggtggggaaaggagaagagatagaaagtgttcgtaggtggaagatgtagagaaaggtaagcgtttatttagtttgtttttacgtaggaaaaatgtgagtatgttttaaagacgatcgaaagaatgttttgaggagggggcgatgatattagagggacgttcggcgggttttttattttttttcgttatttttttttttcgcgtttatttttcgtcgtttcgggtttttttttttttttttatttcgcgaggttcggggtcgtagttatttcggatcgtcggtttagttttcggtatttttttatcgtaatggttttttcgtttagttggtcgattatggttttatcgttaagattttttcgcggatttcgtaatagttttagtttttttattcgggtttcgcgcgttgtttagttattggttcgagaagttgcgcgtatcgttttcgtttntcgacgtgcgcgcggtnttaggggtngggntcggtttttacgtagtcgtcgtattggtcgaggcgtantcgatngtgnatttatttatggttttaagcgaggtttggcgcgggacgncggacgcggtgcggggcggatagtggcgttaaggggcgtnttagngagttgcgcggtcgttgnggagggagtttagggcgtagtttcgggcgcgtttgagcggttttcgangcgttttcgtttcggtnttttggcgagtgtacgggttggtattttagaggaggttaaagttgttttttgagattttagttgttaaatagagtcgtagtagtgattcgattcgtttagtaacgcggggttgatttttcgtttttaagttttgagtttggtatcgtggcggtggggggtgggggtggggggttttcgaaagggaattagattcggttttcgtttttagagaagaggatagtgtgtgggggtattttatgtcgttangtaattttatttttaggtagacgtggtataggttttaagggtgttggaattatagttgggaaatntannggacgntcgtttcggagganggtngttantttgagtcgangtcgaagnaacgtgntgggaattttttanggtggattnttataangttnagggtagggttggttcggaaagtatgagtagtttatgttaaaatattggagagttgaaatagtttggtaagtcggggatagtaatgagttgtttagtatgtaagggtgtagaggagtaagtgatatttgagaattagaaagttagataagggttaagtaaggatggttttgttttgggttttttggtatgtttggagtagcgttgatgaatttaagtgttgcggttttatttttgttttagtgttatcggttggattgaaagtggggagtggtgttaatggtatggatattaattataatattttaggatgaattttagacgatattttgtggattttgtttgtgcgttgggttttgtacgggggtattcgtttgtttgatgtatggttgttgtggtgggttttttgggacgatgtggtgtgtgtgtgcgagtttgtggggttggatcgggtttgttgtggtggtttaggtttgttttggtcgcggtttggggggcggaggtcgggagtttatttggaggtttaggagttttaagatttagttttgattaattatggtaaaaatttatattttttatttaaaaattattaaaaatgtagtttgggtttttgtggtgacgggcgtttgtaatcgtagtaattcgggaggttgaggtaggagaattgtttgaattcgggaggtagaggttgttatgagttaagattaagttattgtattttagtttgggggataggagtaaaaattcgttttaaaaaaagaaaaaaaataatattgtagtattgttcgttgttagattttataatattaggtgttaattttatgtaaaaatataataagtagttaggcgtggtggtaggtttttgtaattttagttatttaggaggttgaggtaggagaattatttgaatttgggaggtagaggttgtagtgagtcgattatgttattgtattttagtttgggtaatagagtaagatttagttttttatataaataaataaaataaaataaaataaaatagttaggtatggtggtatatatttgtagttttagttatttggagggttaaggttggagaattatttgaatttgggaggtggaggttgtagtgagttaagatcgtattnattgtattttagtttgggtaataagagtgaaaattttattttaaaaaaaaaaaaaaaggttnaggcgtagtggtttaaatttgtaattttagtattttgagaggtcgaggcgggtagattatttgaggttaggagtttgagattattttggttaatatggagaaattttatttttattaaaaatataaaaattagtcgggtgtggtggcgtatgtttgtaattttagttatttgggaggttaaggtaggagaattatttgaatttaggaagtggaggttgtagtgagttgagatcgcgttattgtattttaggttgggtaatagagtaagattttattttaaaaaaaaaaaaaaaanggaaaaaaaaatgtagaatttgaatagcgttgttttttttgttttggtttttaatatattattttttattatttatttatatatataaatatttatttatatagtatatatattttttgattttttagaataaagtggattagaaaatttgggaggacgttgtgtgattgttggttttcgttttttaaattaaattagataatttattggataatatcgtgaggtatgaaagaagattgtttttgagtttatttagtttaaggtaggacgggtagtaggaagtagtttggttttttttttaaatttcgtttcgagtcgtagatttttgcgtttttagttagttgtttttgtacgtggttgttttgatatgtagggagaaaattttcgtgtagataataggaaaagttttttgtagcgtaagatagaggtttntattattattntaggtttatagttggtttttatnttnggttggggttagttttatttagttgttaggagtttgttttttttgagtttttgtagattggtttattagagattaaaaatttagtngaggtatataggaggtaaggttagaagagaagttgttagttttagtttttttggtttaagtaagaaattaagggaggagataggtttatttcggtatagttttttttgtttttgagatagagttttatttttgtncgtttaggttaaagtgtagtggcgcgattttagtttagtgtaatttttatttttcgggtttaagtaatttttttgttttagttttttgagtagttgggattataggtgttcgttattatatttggttaatttttatgttttagtagagatggggttttatcgtgttggttaggttggtttggnanattttgattttaggtgatttattagtattttaaagtgttaggagtataggcgtgagttattatttttggttattattttggtatagtatttaaggaaattaaagtntataatttaaatggatttgaaggagcgattttagttttnggtgtttatagaatttaagtttaaanttttagattaggtggtagatgattgttataatgtgggtaggttgaggtgaggtgagggagtttggtaggngaagggatatgggtttaaaggtggtttcgagttagatatagggatttnagagtattaacggtaagtttgaattttttattttaagttatttggataagggaagaggagagatgattgaaaattttataagggtagtgagagggtaagcgtgggggtttgtatggacgttttttagtatatacgtaatattttgtttatagtggttgtttatgggttgagtaggcgatcgttggttggttgtagttatagataatgatgttattttgtttaaagggtagtatttaagtttcgttttcgttttagtaggcgggggagggtttagggagaggtagatattttnttnttgttgggttaaggttaggttttattttttgataanttgtttatattaagaaatatagaagtttttngtgattttgtttttacgtgaggtnggattaatttaagttaatatatgtgttttagattaagtttagttaggagataaatagtttttatcgttatttttttttttttttagaatcgtatagtttttagttatatggtagtgggtttcggagatagtatggggaagggtattttttttttttttnggtttttcggaggggattgaggggttttttttggtttatttatggtgatttagttttaaataatgttttttgaagttttagaagttgaatgagnttagtttagggtgtcgtggagttgtatttttttatattttagaagtagtagttttaagaataggattttttgttttttaattttacggaatttgggggttaacgttgggttagttaatatcgggtggggggtttaggttggataggggcggggtttttgggaattttgttgagatttattttttttagtggtttggtaggtagtagaaagggtttatttcggacggtttttgtttttagtattggtagttgggtttttatgttttatantanttgtcggtttaaatagtggttattgtttgtcggaggttataattttattggtcgtttagttnttgatttacgtagttaaagagagtgggtgggggttggttagaaggatttagttgttttttattttagtttttagttagggcgtcgaggttagcggtttggtggtgttgggaaattgttttaatagttagtattagttgattttgaaaaagtagtagggagtcgagggagtaggggttagggttgggttgtaggcggtcgtttttttgattgtttttggtggaagtagttttcgtgagtttttttgtttcgggttttagttttggggtgttgtttagattcgatttagtagtttagttttttttttttttttantgatcgttttttcgttgttttttatttattttatttaaaagtttttttagtttttttcgtcggtgtagtgggatttggggattattgggtttnnnttgtcggttttgtttttttagttttttttgtttttttttatttatttatttttttgtttaaattgtaggggttgttgttttcgtatttttttttttttgtanttttttttttttgttttttggagtgtttttgttttttttttgtttttttagtttaggggagtttttttcgtcgtt

SEQ ID NO: 47 - DNA, 5152 bp, Artificial Sequence
  chemically treated genomic DNA (Homo sapiens)
  unsure (67, 2620)
ttttttttttttttttttttttttttttttttttttttttttttttttttttttttttttttttttnttttttttttttttttttttttttttttttttttttttttttttttttttttttttttttttttttttttttttttttttttgattatttgagtttaggagattaaggttgtagtgagttatgatcgtgttattgtaatttagtttgggtaataaagtaagattttgttttaaataataataataattttttttttaaagaaaaattattagtttgggcgcggtggtttatgtttgtaattttagtattttgggaggttaagatagggggattatttgagattaggagttcgagattagtttggttaatatggtgaaatttcgtttttattaaaaatataaaaattagtttagtgtggaggttggtatttgtaattttagttatttaggaggttgaggtaggagaattgtttgaatttaggaggtggaggttgtagtgagttgaaattaggttattgtattttagtttgggtgatagagggagattttattttaaaaaaaaaaaagaagaagaagaaaaagaaatagttttttaggggttgagtaggttgtatatgatgattaggtaataggaggtagaattggaagttatggttgggtgcggtggtttacgtttgtaattttaatattttgggaggttaaagtgggaggattgtttgaggataggaatttaagattagtttgggtaatatagatttcgttttttttttcgagatagagttttattgtcgtttagattggagtgtagtggtgtaattatagtttattgtaattttaattttttaggtttaagtaatttttttattttagttttttgagttgttgagattataggtatgtattattatatttgattaatttttttattttgtgtagagatacggttttagtatgttatttaggttggttttgaatttttgagtttaagtgatttttttgttttagttttttaaagtgttgggattataagtatgagttattatattttgtaattttttattttaaaattttttgtagatatgatgttttattatgttgttagggttgatttcgaatttttaggtttaagtaatttttttattttagttttttaaagtgttgagattataagtatgagttattatatataatttatgttttattaaataaaaaatagggtttggtgtggtggtttatgtttgtaattttaatattttgggaggtcgaggtaggtagattatttgagtttaggggtttgagatcggtttgggtaaaatgataaaattttatttttataaaaaatataaaaattagttggacgttgttttggtgcgtgtttgtggttttagttttttaggaagttgaggtgggaggattatttgagtttaggaggtcgaggtcgtagtgagttgtatcgtgttattgtattttagtttgggtaatagagttagattttgttttaaaaaaaaaaaaaaaaatttaggttgaatttagggtgtttgtttttagagttagtgtttttaattaattacgtagttagttttttttgagtgttttgtagacgtttgtttttattggtatggttatttgtttttcgtatttattttattcgtatatttatattttgttagggttttttttagttattattattttgatttttattatttttattatttcgcgttaggtaggatgaggaaataggtgttgtaatattagtaggtaaagggtgttgggaggacgaagacgtttggttttgggttgggggaagagtaaatagattttaggcgtttttttgtagaaagtttttggaggtagagttagaatttgaatttagatttgttagatttttaagtagatttggagagatttattgcgaggtggtggttttttgcgggattttttatgagggatttttttggtttaggattttatttgggattttaaatattttgttggaagttgttgcgatagagcgtttttttgtagttagggaataggatggggtagggtttttaagttttagttcgttttttaaggaaggaattcgtatttttatatagtattttttttttttatttttattttttttattcggtggtttacgggttttttttgtttatagagtagtattggttatttatttattgtgttgttttattttgttttttattgtttgttatttttttatcgtttgtttttttaggtaatgattagtgattgtgcgtttgttgtgtgtttatttttgtgaattaggtcgttgcgggtagacggtagatgtacgggggcgtgtaaggagtagagagttaggaaggttttcgggaggaagcgttatttaagttgagaattgaagagttgattaaattaagtattgtttatggttaaatagaaggttaaggtggacgtagggattgaaggaaggtagtgtagaggagggtcgggggaggagtgggaggatatagacgggaagattgattttgtattttagaattaagacgtagttacgattattagcggtttaatgttgcgtttcggcgcggtcggagttttgttttatgcgtatcgcggggttatntaggagtggttcggttgtatttatttttcgcgttttaatttattgattttttattattattttgcggggtaggttagcggttttcgttttacgaaagtaaaagtcgaggtttaaagaggttgagtgcggttttaaattatatagtttggttagtggtagtgtcgggatttgaatttaggggtagttttttcggattgttaacgtttttttcgggtttttgttttcgttttatattaagggagtgttcggaggggttttagttttcgtttattttcgaagtagattttcgagtagattcgtagtacgcgcgggagggaggcgggttttaaggcgcgtacgaatttttgatggggaatcggttttttgtttttcgcggttttttgggttaagattggggggggggggggggttttttgggtattttaagtttcgtttcgttgatgtttcgtttcgaacgtagaagtcgtttcgttagttcggggagttttgtagtttcgtttcgtcgaagtttcgtttttcgttttttgtagtttttatggggaaggggcgatgatgaagatgaagaagttttagacgtttttttagtagtgtttttagttggggtatttttcgagagtcgatttgatagcgtttaagcgttgttacgtttgtaattttaatattttgggaggttaaggcgggtggattatttgaggttaggagttcgagattaggttgattagtatggcgaaattttcgtttttattaaaaatataaaaattagtcgggcgtggttgtacgtatttgtaattttagttatttcggaggttgaggtaggaaaatcgtttgaattcgggaggcggaggttgtagtgaggtgagatcgtattattgtattttagtttgggtaataagagtaaaatttagttttcgaaaaaaaaaaaaaaaggaaaaagaagagaagaaaaaaatatatagttttggagtttaaaggttatgtttattttatttaattattgaattttagtggttagtatagggttaggaataaagaaggtataaataattttatttttttttttttttttttgagtcgtagtttttttttgttatttaggttggagtgtagtggtagtattatagtttattgtagtttggatattttagggttaggtgatttttttattttagttattttagtagttgggattttaggtatttgttattatattagattaatttttaaaaatattttttgagagagggttttattatgttgtttaggttggttttaaatttttagttttaagcggtttttttgttttagattttatttgttgggtttataggtatgagttatagtatttgttaattttttttaaatatataaatgaatataaaattttaataatgtatgagtattttgaggaaggaattgataaaatgttttattttttatgggaggtacgttatatgaagaattatgaaaaatggtcgaaatgattggagaggttaagtttggatgagattgggatggggataggtgcgggacgaggggtattatttttatattttttataagtttgttataggtaagagggcgtaggttttttatagttttattggggagaatcggtattattggtggtattatacgaagagaatgtgattttttatgtaaaagaataagtaattttacgcggtgttgtgaggttagtgttgcgagtttttgaggtgcgtaattttcgtacgatcgtgggtgggaaatatcgaagttaaaatttcgttatagttttttagatgaaggcgtcgtttgattggtgatagtttggcgcgaatttgagtacgtcgaataaaggaagtgacggtagaagtcgcgtatttgacgagggtgggattatacggcgttgcgtcgcggtagtattgttttgattggttgattttttgcgatatcgttttgttagttttttgttttcgttagtgcggagggttttgtttttcgtaaagatggtcgcggaggtttttggagttaattgggagcgtagtacgcgttttttggagtatgggtagaggagataggaataagcgtagtattcgtgagtatcgattggttgaagcgagtatttcgggagttgattggtttcgttattcgcgggaaggcgtttgtggtgttagagaaaagtagttagagcggcgtagtggcggtcgcgttttgtggtttttcgttatttttttagattcgtattttttcggtttttttgcggagaatcgtgattaagatgtggaatagtaatgatgggggtgcggggtggaggaggaagagaatcgtaggaggttttagtaagagggcgagtttagggttcgagaggcgtgtggtagcgggagaggaagggcgggagcggagttggggcgtttgggggttattcgtaggaaggcggcgaggaaggttagggagattcggttagtgtttgaaggggcgaagttttcgggagtttgcgggtttttcggaggcgtgggacgtggtataggtattaattttgttgtttaaaatagg

SEQ ID NO: 48 - DNA, 5152 bp, Artificial Sequence
  chemically treated genomic DNA (Homo sapiens)
  unsure (2533, 5086)
tttgttttgaataataggattagtgtttgtgttacgttttacgttttcgagaaattcgtaggttttcggaggtttcgtttttttaaatattgatcgagtttttttaatttttttcgtcgtttttttgcgggtgatttttaaacgttttagtttcgttttcgttttttttttttcgttattatacgtttttcggattttaggttcgtttttttgttaaaattttttgcgatttttttttttttttatttcgtatttttattattattgttttatattttggttacgatttttcgtaaagaggtcgagaaggtgcgggtttgggggaatagcggaaaattatagaacgcggtcgttattgcgtcgttttggttatttttttttggtattataaacgttttttcgcgaatggcggagttagttagttttcggggtgttcgttttagttaatcggtgtttacggatgttacgtttgtttttgttttttttgtttatgttttagaaaacgcgtattgcgtttttagttggttttaaaagttttcgcggttatttttacgaagggtaaaatttttcgtattagcggaagtaaggggttggtagagcggtatcgtaagaaattaattaattagaataatattatcgcgacgtagcgtcgtgtgattttattttcgttaagtgcgcgatttttgtcgttattttttttgttcggcgtgtttaggttcgcgttaaattattattaattagacgacgtttttatttaaagggttgtagcggagttttggtttcggtgttttttatttacggtcgtgcgggaattgcgtattttagggattcgtagtattagttttatagtatcgcgtggagttgtttgtttttttatataggaggttatatttttttcgtgtaatgttattaatggtgtcgattttttttagtggggttgtgagaaatttacgtttttttgtttatgatagatttgtgaaagatgtgagggtggtgtttttcgtttcgtatttgtttttattttagttttatttaggtttggtttttttagttatttcgattattttttataattttttatataacgtgttttttatagggagtggaatattttgttagttttttttttaaaatatttatgtattgttagaattttatgtttatttatgtatttaagaaaaattagtaggtgttgtggtttatgtttgtaaatttagtaaatggggtttgaggtaggaggatcgtttgaggttggaagtttgagattagtttggataatatagtgagatttttttttaaaaaatatttttaaaaattagtttggtgtggtggtaagtgtttggggttttagttattggggtggttaaggtgggaggattatttggttttggggtgtttaggttgtagtgagttgtgatgttgttattgtattttagtttaggtggtagagagagattgcgatttaaaaaaaaaaaaaaaaaaatagaattgtttatgttttttttgtttttggttttgtgttggttattgggatttaatggttaagtaagatagatatggtttttgggttttaggattgtgtgttttttttttttttttttttttttttttttttttttttcggaaattgagttttgtttttgttgtttaggttggagtgtaatggtgcgattttattttattgtaattttcgtttttcgggtttaagcgatttttttgttttagttttcggagtagttgggattataggtacgtgtaattacgttcggttaatttttgtatttttagtagagacgggggtttcgttatgttggttagtttggtttcgaatttttgattttaagtgatttattcgttttggttttttaaagtgttgggattataggcgtagtaacgtttgagcgttgttaggtcgattttcgagagatattttaattgggagtattgttgagggggcgtttgggatttttttatttttattatcgttttttttttataaggattgtaaggggcggggggcggggtttcggcggggcggggttgtaaggtttttcgggttggcgggacggtttttgcgttcggggcggggtattagcggggcggggtttagggtgtttaggaaattttttttttttttttaattttaatttaaaaaatcgcggggaataaagagtcggttttttattaagaattcgtgcgcgttttggaattcgtttttttttcgcgcgtgttgcgggtttgttcgggggtttatttcgagggtgagcgggggttggaattttttcgagtatttttttggtgtggggcgggggtagagattcggagaagacgttagtaattcggggaaattgtttttgggtttaaatttcgatattgttattggttaagttgtgtgatttggggtcgtatttaatttttttggatttcggtttttgttttcgtggaacggggatcgttgatttgtttcgtagggtagtgatgaaaagttagtgggttgaggcgcgggaggtggatgtagtcgggttatttttangtggtttcgcggtgcgtatgggatagagtttcgatcgcgtcgggacgtagtattaggtcgttggtggtcgtggttgcgttttgattttgaagtgtagggttagttttttcgtttgtgtttttttatttttttttcggtttttttttatattgtttttttttagtttttgcgtttattttggttttttgtttgattatgggtagtatttgatttgattagttttttagtttttagtttaaatggcgttttttttcggaagtttttttggttttttgttttttgtacgttttcgtatatttgtcgtttgttcgtagcggtttggtttatagggatgggtatatagtaggcgtatagttattagttattgtttgaaggagtaagcggtgagggaataatagatagtggagggtagggtaagatagtatagtggatgggtggttagtgttgttttgtgggtagggaggattcgtgggttatcgagtaggggagatggaggtggaggagagagatgttgtgtgggggtgcgggttttttttttagagagcgaattgaggtttgaaggttttgttttattttgttttttggttgtagaaaaacgttttgtcgtagtagtttttagtagagtgtttgaggttttaagtggggttttagattaaggaggttttttatgaagggtttcgtagggggttattatttcgtagtgggtttttttaggtttgtttgggaatttggtagatttgggtttaaattttgattttatttttaggggttttttgtaggaaggcgtttgggatttgtttgttttttttttagtttaggattaagcgttttcgtttttttagtattttttgtttgttggtgttataatatttgtttttttattttgtttgacgcgggatggtggaaatggtggaagttagagtgatggtgattagagaaggttttgatagggtgtgggtgtgcggatggggtgagtgcggaggatagatggttatgttaataggggtaggcgtttatagggtatttagaaggggttggttgcgtggttggttaggagtattggttttggaggtaaatattttgggtttaatttaggtttttttttttttttttgagatagagtttggttttgttgtttaggttggagtgtagtggtacgatatagtttattgcggtttcgattttttgggtttaagtgatttttttattttagttttttgagaggttgggattataggtacgtattaggataacgtttagttaatttttgtattttttgtaaagatggggttttgttattttgtttaggtcggttttaaatttttggatttaagtgatttgtttgtttcggttttttaaagtgttaggattataggtatgagttattatattaggttttgttttttgtttaatagaatataggttgtgtgtgatagtttatgtttataattttaatattttgggaggttgaggtgggaagattgtttgagtttaggagttcgagattagttttggtaatatggtgagatattatgtttataaaaaattttaaaataaaaaattgtagggtgtggtggtttatgtttgtaattttagtattttgggaggttgaggtaggaggattatttgaatttaggggtttaagattaatttgggtaatatattgagatcgtgtttttatataaaataaaaaaattagttaggtgtgatggtgtatgtttgtagttttagtaatttaggaggttgaggtgggaggattgtttgagtttgggaggttgaggttgtagtgagttatgattgtattattgtattttagtttgggcgatagtgagattttgtttcgaaaaaaaggacgaggtttgtgttgtttaggttggttttgaatttttgtttttaagtagtttttttattttagttttttaaagtgttgggattataagcgtgagttatcgtatttagttataatttttagttttgttttttattatttgattattatgtataatttatttagtttttgagaggttgtttttttttttttttttttttttttttttttgagatggagtttttttttgttatttaggttggagtgtagtagtttgattttagtttattgtaatttttattttttgggtttaagtaatttttttgttttagttttttgagtagttgggattataggtgttaatttttatattgggttaatttttgtatttttagtagagacggggttttattatgttggttaggttgatttcgaatttttgattttaggtgatttttttgttttggttttttaaagtgttgggattataggtatgagttatcgcgtttaggttagtaatttttttttgaaggaaggattattattattatttgagatagagttttgttttgttgtttaggttggattgtagtggtacgattatggtttattgtagttttgattttttgggtttaagtgattagagagagagaagagaagggagaaaagagaaaaagaaagaaggagaaaggaagagagagaggaagagaggaggagagaagagnggaaagggggaaggaaaggaaggaagaagggggagaaaagaaaaagagagagagagaagagagaag

SEQ ID NO: 49 - DNA, 6306 bp, Artificial Sequence
  chemically treated genomic DNA (Homo sapiens)
ggaattagatattgaatgtagaattatagaaagatagaaagaatttggggttttgagttttagtgtattattatataagtattaagttgtatagttgtggattttttttatatgtgagaataagcgtttgtgtattaaagatatttttgtttatgtagttaaattttattttgatttaaatattatttttatttaaaatggtattgaaggttttattttaggtaaaaggtaagaaagataaataaaatatgtaagaatttttaagaaataaaattataattatttaaatatgaatagaaaattttaaaaaaaattgatagaaaatttttaaaatggtatttttatatattaaaataattagttaaaatttttaatttaaaaaatgatattatttataatagtaataaaaataaggtatttaggaataaatttaagttaaaagttaaaatttttatgtagaaaagtatgagattttttggaaagattttaagaggattaaaatggtttaaggatagtaagagttgatatttaggtgttattttttttgaaatatatttaaggatatagtgtaattttgattaaaattttaatatagttttttttggaaatttataagttatattttatatagaagagtaaagagataaaaataattaagatattttcgagaatatagttttagatattaaaagttatgataagttatattattaaagaaaataggtagtggtttagggatagaaaaatagatttatagaatagaattgattttatatatatttgtaaatttaaggtgataagtgaaggtggtaaaaaggtgatatagttaaattatattaggataattgaaattaaaataaaatagagattggagatttatttgataatatatatgaagagtgaattttagatgacggattattaaatatgaaaggtaaaattttaaatattttaggaaaaatagaatatttttaagagtacgatgtattaaagaatttataaatgagattttaatggattttttttttatattaaatttaagggggaaaatgtttaattatattaaaagaggtttttttaataaaaaaaaaaaaaggatggaatgaaggaaggaaacggaaagataggttaaaaatagataatatttgtattattataatattttattaataaaaagtttttaaaagttagtaagaaaaagaaaaattaaggaaaaaaagataaatataaataattaataaaaatttgaaaaaatgtttaaattttttagtaattagggagtgtaaattagggttacgataaaaaaatattttatatttattaaattgggggaaaaaattttaagagttgttaagaatatataataattgtaaattgttttatattttaggtaagagagtaaattggtattattatttggggaaattatttttttattagtggtagagatttaagttattttaagttatcggtggtttatttttacgggttagtagtaattttagtttttgtttttttagacgaaaaaatttgattgaggggtataaagtagaaatagagatttaggtaagttttagagtaggaatggaagtttattttaaaaggttttaaaataggaagaaaggaaggtgtgtttgttagagatttaagcgggaatgtgaaggttaaagagagtaggttaagtgttcgatttaatcgttgattttttttttttcgtttgtttgttttttttttttttgagagggagtttcgttttgtggtttaggttggagtgaagtggcgcgatttcggtttattgtaagtttcgtttttcgggtttacgttatttttttgttttagtttttcgagtagttgggattataggttttcgttatcgcgtttggatatttttttgtatatttagtagagatagggttttattatgttgattagggtggttttgaatttttgatttgaggtgatttattcgttttagttttttaaagtgttgggattataggcgtgagttatcgcgttcggttttgattttaggatttttataagtttgtttattttttatgattttttttttaggataggttgtcggtaggtatagagttttttttagttttgggaagtgtttttagggagttatatgtacgtttatttgaggtttttttttttttttcggtggagtgtatttggaagattatattttattatttttgttttttaatatgtatgtttaggaagttgtttttttttcgggtttatatttaattaatattttgataataggtgtggattattaggaaatggtttttttttggcgttgtagaattattatttttagagaagtaaattcggtaattgttaaattattttttaatatttttagtgggttgggggagagtttattattgttttatttatgtttatttgtaatagaaaaaaaaatatgatttacgtatattcgttaatatagatgaattttaaaaataaataaaagaagttagaagatatatacgtttttgtttatataaaggttaaagattggtaatattaaataatatattatttagtaacgtttgtatgtgtgataaaattatttagaaaagtttaggaagtttaatataaattttaagatagtgtttatttatggttgtagtaaggagggttttattggggaagtgtaaattggtaaaatttattggtaattggtaaagttttatttttttagttgaatgataggttttatggatttattttattttttttaaaattatgtaaatcggttagttatatttttttttgtatattatgtattttataatattttaagtgatttaaaaatatacgaaaaagttgttttaaattatttttttgtttatttttttgttttaaaagaaagtttttgtttaaaagtggtttttttaattgtaggtaaataacgatattaatatttggtatttataggagtgttttttaaaaaaaaaaaaaattattattatagggtacgtattaaggtttatatttgtaattttagtattttgggagggagacgggggagggagggatcgtttgagtttaggagtttgagataagtttggttaatatggcgaggttttatttgaataaaaaaaaataaataataaaaaaaaaatttttattagttgggtgtggtggtatgtgtttatagttttagttatttggtaggttgaggtgagaggatcgtttaagtttacgagttaaaggttgtagtgagttatgtgtatgttattgtattttagtttgggtgatagagagagattttgttttaaaaaaaaatgttattaaagatattgatgtgtgtatttttttttatataatgtatattaatttgttttgtaaaataatgttaaagtataaaagatttaaagttgtaatataaaatagattttattgatttgtattaatataattataatttttttatatattattgatatatattttatatttgtttaatgaaattttttaaagtatcgttagtgagtaaaattaagataaatttattaagtgttaaggaaatattaagggagattattatttaattatcgtatatgagattttaattttaaattgttacgtgaagttttaaatcggattttttttgtttaagggaatttgaacgatgataattttgtagttttgggttaatttatagatttagtttttataacgttataatatttaattaaaatttttgtttaatttttatcgtatcgtttgaaggtatttttatgtgtatttattttagaatatttttggtaaggtcgtcggtttcgggttataagatgagttagggatagattggagattatttttaaattttttaggaatcggttattttttagatttttagatcgttttttagagtttcgtagtgtggagggtaacgatagaaagattgttgagggggtttaaattgttgagttaaatatatggttaaaagttagagttaattgggattttgtaaattatttcgtttaatttttcgttttgtagatggggaaaatacgttttagaagggagaattttagttcggggaattttagttcggggtttaataacgatttaagtttgttttttttagtattggttagtggttttttttcgttatttatttttaagtgtttttattggttgttaatacggaggggttagcggggtgaaagaatcggcgttttcgtagtgtggttaggttgggttaaaaaacgttttagaagtaatcggattaatttttttttttataggtggagaaagtggagaaagtagagtgacgtagttaagggagtaaatcgatttttagttaataagtggtaaaagtttgaagaaagtgattaagattattgatgatttcgttgtttatttttaagggggcgggtattataatttcgacgttatattacgtattatttcgtaaaattttcgcgttttttacgtagaattggtaagagggaaggcgagatagtagtgaatagttggtacgtagtatttatagtatcgcggtagtagttagtgtcgattttcgtttagtttttttgattttgttcgcgggaagaatggggaaatagtaaggttgcggcgtttttcgcgagacgaggtatttgaggttggtttcgtagtttttcgtcgtattagtatcggagttttatattttattttcggggttaagttatcgtcgggaattttgtgatcgtagaaaggtagttttaggtttcgtttttatttaagtttcgtttttattgtttttcgttttgtatttgttaattttcgggacgtcgcgcgttattaagtagttaatttttattttcggatttatttagttttttttttattttttttagagatagcgcgattgcgatttaggttttcgcgtatttaattggcgaagttggagcgttagttttcgttgattggtgtcgagaaatttgttttatagatattcgcggggcgtatagttttagtcgttcgtgggtttttcgttagtcgtagttttggattataattatggtggatatgatggatttgtttaggtcgcgtattaacgtcggtatgttagtttaatttatcgataagtttgtttgtttcgtagggaggttggaaaaggtgtgcgggttcgtaattatgggtttttaagttcgtagttggagggagggatttcgtttggataacgggggatgaaaaaggacggaaagttttcgattattgcgttttcgatttttttattttgtataaggaattttttggaaattttttagtcgttgtagttttattttggcgtttttttatggtacggaaataaagtgtttttaaatgttgagttttaaattttagtgttcgtcgttttcgttttagtcgtgtttacgtaagggaaattataaatattatttttatatttatttttagattttttagtttatttagacgtgacggacgtagataaaattaatttgttggttttttttttttttgaaattatttatttttgtaaatttcgttttttcgttgtgatcgtttttttgtaaaatatgttttggttgttcgttttgggtttcgtagtaacgagttatttaattttagtattaaagtgaagtttttttattttataggcgagaaataggtttaaagttttggaattagtgatttgaaaagttgaggaaaagaaaattattatataaagatttatttagtagtttattttatttatatatttttttttttaaatgagtgttgttttgattttttaagtagggaaattgagtaggagtggtaggtggttgattaaaatgtttagaaattcggtaaatggtaaagttggtatttaaacgtaatttgatagcgttttttatagttgttttttaggagtaggatttagatattttagtaattagttttttttttattttattatgtttgttttttaaaatatatttttcgtgggatatgtattgtttaaattatgagtgttagtagattttatttttagggtgggtattttttaatttgttattagaatagggttgttatatttagtaaatatagaatttatttaatattataaaaaaaatttttgtttatttgaaatttagaaattaattgtgtgttttatgaatagatttgataatataagattataatttgatttaataagttgaataaattgaatgaataaattgtttaagaaatagttgatttgtgtttaattaaggattaatgtatttatttttagttaaattttgttgttgttttagtgagattttaattatatgtttcgtttttaga

SEQ ID NO: 50 - DNA, 6306 bp, Artificial Sequence
  chemically treated genomic DNA (Homo sapiens)
tttaaaaacgaaatatataattaaaattttattaaaataataataaagtttgattaaagatgagtatattgatttttagttgagtataaattaattgttttttgaatagtttatttatttagtttatttaatttattggattaaattataattttatgttattaaatttgtttatggaatatatagttaatttttgaattttagataaataaggattttttttgtagtgttaagtaggttttgtatttgttaaatatggtaattttattttgataataaattaaaggatgtttattttaaaagtgaaatttgttggtatttatgatttagatagtatatattttacggagggtatgttttaaaaaataggtatgatgaagtaaaaggagaattggttgttagaatatttgggttttatttttgggaagtagttgtaaagagcgttgttagattgcgtttgaatgttagttttgttatttgtcgagtttttgagtattttagttaattatttattatttttatttagtttttttatttgggaagttagagtaatatttatttaaggaagaggatgtgtggatgaaatgagttattaaataagtttttatataatagtttttttttttttagttttttaggttattgattttaagattttgggtttgtttttcgtttgtagaatgagggaattttattttaatattggggttaaataattcgttattacgggatttaaagcggataattaaggtatgttttatagagaagcgattataacgaggaaacgaggtttgtaaaaataagtaattttagaagagaaggaaattagtagattagttttgtttgcgttcgttacgtttgagtaaattaagaaatttgaaggtagatgtgggagtggtgtttataattttttttacgtaagtacggttagaacggaggcgacgggtattggaatttagaatttagtatttgaaaatattttgttttcgtgttataaaagagcgttaaaatggggttataacggttaaagaatttttaaaaagttttttgtgtaaaataaaggagtcgggggcgtagtgatcggaggtttttcgtttttttttatttttcgttatttaggcggggtttttttttttagttacggatttgggagtttatgattgcgaattcgtatattttttttagtttttttacgaagtagataggtttgtcgatgaattgagttagtatgtcggcgttgatgcgcgatttgggtaagtttattatgtttattatgattatggtttaagattgcggttggcgggaaatttacggacgattgaaattgtgcgtttcgcgggtgtttatggggtagatttttcggtattaattagcgaagattagcgttttagtttcgttaattaaatgcgcggaaatttaaatcgtaatcgcgttgtttttgaaaggggtggagaaggggttggatgagttcggaagtggagattggttgtttagtgacgcgcggcgtttcggaagttgatagatatagggcgagaggtagtggaggcgggatttggataggggcggaatttgagattatttttttgcgattataggattttcggcggtgatttgatttcggaagtggggtgtgaagtttcggtgttggtgcggcgggggattgcggggttagttttaggtatttcgtttcgcgggaggcgtcgtaattttattgtttttttatttttttcgcgaatagagttaaaagagttaggcgggagtcggtattagttgttgtcgcggtgttgtgggtgttgcgtattagttgtttattgttgtttcgtttttttttttgttagttttgcgtgggaggcgcgggagttttgcggaatgatacgtggtgtggcgtcggggttgtgatattcgtttttttggagatgggtagcggggttattagtgattttgattattttttttaggtttttgttatttgttggttgagggtcgatttatttttttagttgcgttattttattttttttattttttttatttgtaagaagagagattgattcgattatttttaagacgttttttagtttaatttggttatattgcggaggcgtcggtttttttatttcgttaattttttcgtgttggtagttaatagaagtatttaaggatgggtaacggggaagaattattggttagtattaggggagataagtttaaatcgttgttagatttcgagttagggtttttcgagttagggtttttttttttgaggcgtgttttttttatttgtaaaacgaagggttaggcggaatgatttgtaaggttttagttgattttgatttttggttatatgtttgatttaatagtttaaatttttttagtagtttttttgtcgttgttttttatattgcgagattttggagggcgatttggaggtttggaagataatcgatttttgggagatttgggggtagtttttaatttgtttttggtttattttgtgattcgaagtcggcggttttgttaggagtattttagaatgagtgtatataaaaatatttttaaacggtacggtggaaattggatagaagttttaattgggtattataacgttgtggaaattgagtttgtgaattggtttaaagttatagaattgttatcgtttaaatttttttaagtaaaaaagattcgatttgagattttacgtggtaatttaagattggaattttatgtacgataattaaatgatagttttttttagtgtttttttagtatttaataggtttgttttagttttatttattaacggtattttaaaggattttattaaatagatgtagaatgtgtgttagtggtgtataaaaaagttgtggttgtattggtgtaagttagtaaagtttattttatattatagttttaagttttttgtattttagtattgttttgtaaagtaagttgatgtgtattatataggggagagtatatatattaatgtttttaatagtatttttttttgaggtaagatttttttttgttatttagattggagtgtagtagtatgtatatagtttattgtagtttttaattcgtaggtttaagcgatttttttattttagtttgttaagtagttgggattataagtatatattattatatttagttaataaagattttttttttgttgtttgtttttttttgtttagatggggtttcgttatgttgattaggtttattttaaatttttgggtttaggcgatttttttttttttcgttttttttttaaagtattggaattataggtgtgagttttggtgcgtattttgtaatagtgattttttttttttttaaagagtatttttgtgagtattagatgttaatgtcgttgtttatttgtagttagaaagattatttttaagtaaaggtttttttttaaaatagggagatgagtaggaagataatttaaaatagttttttcgtgtatttttgagttatttaaaatattataaaatatatgatgtatagaaaaaagtatagttagtcgatttgtatagttttgagagaaatgaaatgaatttatggggtttgttatttagttgaagaaatggaattttattagttattagtaaattttattagtttgtatttttttaatgaagttttttttgttatagttataagtaaatattattttgaaatttgtgttaagttttttaagtttttttaggtggttttattatatatgtaggcgttgttaaatggtatgttgtttaatattgttagtttttgatttttatataaatagaaacgtatgtattttttgattttttttgtttgtttttgagatttatttatgttgacgaatgtacgtagattatatttttttttttgttataggtaggtatgagtgggatagtagtgggtttttttttaatttattagaaatgttgggggatggtttggtaattatcgaatttgtttttttaaaaatgataattttgtagcgttagggagaggttattttttgatggtttatatttgttattaaaatgttaattgaatgtagattcgagggagaaatagttttttgggtatgtatattaagagataaaaatggtaaagtatgattttttaggtatattttatcggaaaaaggaaggaagttttagatgggcgtgtatgtaattttttaaaaatattttttaaggttaaggagggttttgtgtttgtcggtagtttattttaaggaaagaattatgggaaatagataagtttgtaaaagttttaggattagggtcgggcgcggtggtttacgtttgtaattttagtattttgggaggttgaagcgggtggattattttagattagaagtttaagattattttggttaatatggtgaaattttgtttttattaaatatataaaaaagtatttaggcgcgatggcgggggtttgtagttttagttattcgggaggttgaggtaggagaatggcgtgaattcgagaggcggagtttgtagtgagtcgagatcgcgttattttattttaatttgggttatagagcgagatttttttttaaaaaaaaaaaaaataaataaacgaaaaaaaaaggattaacggttaaatcggatatttgatttattttttttaatttttatattttcgtttgggtttttaataagtatatttttttttttttttgttttaaggttttttaaagtaaatttttatttttgttttggaatttgtttgggtttttgtttttgttttatgttttttagttaaattttttcgtttgaggaggtaaggattgaagttgttattgattcgtgaggataggttatcggtaatttggggtaatttggatttttgttattagtaaaaaaatgatttttttaaatggtggtattagtttatttttttatttggagtataagatagtttatagttattgtatatttttggtaatttttggagtttttttttttaatttgatggatatgaagtgtttttttgtcgtgattttaatttgtattttttgattattgaaaagtttgaatatttttttagatttttattggttatttatgtttatttttttttttttgattttttttttttttattgatttttaagagttttttattagtgagatattgtaatggtataagtgttgtttgtttttggtttattttttcgttttttttttttattttattttttttttttttttattaggaagattttttttaatatagttaaatatttttttttttaagtttaatgtaggagaaaagtttattaaaattttatttatgaattttttgatatatcgtatttttaaaggtattttattttttttaaaatgtttagagttttgttttttatatttaatagttcgttatttagaatttattttttatgtatgttgttagataagtttttaatttttgttttgttttaattttagttgttttaatgtgatttgattgtattatttttttgttatttttatttgttattttaagtttatagatatgtgtggagttaattttattttatggatttatttttttatttttgaattattatttattttttttaatagtgtagtttattataatttttgatgtttggggttgtgttttcgggaatgttttggttatttttgtttttttgtttttttgtatagaatgtagtttatgaatttttaggaaaaattgtgttggaattttgattaaaattgtattgtatttttggatgtattttaggaaaagtaatatttgaatgttaatttttattatttttgagttattttggtttttttaaaatttttttaaaaggttttatatttttttatataaaagttttgatttttagtttagatttatttttagatattttgtttttgttgttattatgaatggtattattttttaaattaaagattttaattgattgttttggtatatagaaatgttattttaagaattttttattagttttttttggaattttttatttatatttgaataattatagttttgttttttaagaatttttatatattttatttattttttttattttttgtttaggatagagtttttagtattattttgaatagaaatagtgtttaagttaagatggggtttagttgtataaataaaagtatttttaatgtataaacgtttatttttatatgtgaaagaagtttatagttgtgtaatttagtatttatgtggtagtgtattaagatttagggttttaggttttttttgtttttttgtagttttatatttaatatttagtttt

SEQ ID NO: 51 - DNA, 5219 bp, Artificial Sequence
  chemically treated genomic DNA (Homo sapiens)
ttattaggattgttttttaatagttttttttttttttgtagttgcgggaaagaggattggttaagaattttaggtggggttagtgtgattgtagggttatcgtaatagttttggttgtggcgttgaggacggtggtgggaagtcgagtagtagggagtatggtagggatgtttttggggattttttggatgggcgggatgttggggttttttagtgtgtttaggatttttggaaggaagatggaaggtgagcgaggattagatgggtttagtttattagttattatatttagttttttgttttaggtagttgtttttttatttttttttatttagatttttttgttatttattttttattattttgtggtaggtaaaatgtagatagagtaggaagagtatgtgtagggtagttagggtgttatagaggagtagtcgttgtgtggggtttacggttcgagatattaatattgttatttaggattatgagaatatagtttaaagggtttggttttaaagtgaggagtggggataagatatttttatttagggtagaattatttttgggttttttttttttatttagggttttttgtgagatggatagttttaggttgttttttttaattttttgggaggatagtttatttttggaagttttttgtttagtttattatgcgtagtgtggatagtttatttattaatagttagaagaggtagaagagggcgtggaggtggatattataggtgatgaataggataatgtaatgtttaaagaggttatagttttgggaaggaggatggtggagaggaaaattatttaggttgggttgttttttggttttttatggggattttgggaaatatatggtttattggtttattttttttattttaggttttggggttttaggatagatgtcgattaaggtttggttattttttttaatattatttttgtttattatatttggttttttattagtagtgttaatatttgtagtatggtgatttgggcgttgtataggtaggtaaggaagtaaatgaaggatgagatttttagttagtagtcgaagtaggtgttaatggttgtgtttattagggtgttttttcgttgtggggtgaaggttttatttagttttaggaggtttttgattttagttttatttagggtttttcgtaggggttgtttttgttttattttattattgtatttttaggtagtttttaatttagtgtagttatttttttaaagttgtttgttttgtttacgataatagtgttagacgtttttattttatggagtaggatagtaattagagtgaagattagtatgagaggtttatagagtttatttgtaattttttgttaatatattaatttatttaggttggagggtataatagtttatttgtttatggttttttaggatttgtttggtggttttattttttgttttggtgtttttttcggttttttagatatgttattttttatttatttgggggaagttgattattttgatagggattatggattttaggagtttgggagaggagaggagagattaaagtaaaggtagtataaggttatgaggttttggagggtaaggtttgaattttatttatttttaattttagggaatggggtttggtttagaagatatgttggatgatacggtagaatagggtagtaaagatagatagggaatgaggaaattatttttttgtttttaaagttatttttaggaaggataattttttgaaatttagttgattgaaatagtagttatatggagaatttagttttattgggttttgaaggagggttcgattatgtattcgtttgttttttttttttgaaaagataggtaggttgggcgcggtggtttacgtttgtaattttagtattttgggaggtcgaggtaggtagattataaggttaggagtttgaggttagtttggttaatatggtgaaattttgtttttacgaaaaatataaaaaattagttgggtatggtggcgggcgtttgtagttttagttatttaggaggttgaggtaggagaattgtttgaattcgggaagcggaggttgtagtgaatcgagatcgcgttattgtattttagtttgggtgatagagtgcgattttattttaaaataaaataaaataaagatatgataagataggtagattttagtagagagtatttagaatttagggttataatgaggaagttttgggaaaagtttagtcggttagatggaaagtttagaatgaaaggtgttattgagggaatagtaaaaacgttttttttttttgtttatttgtgtttttaggtattttcgagtatttttttgaaaaatatatgtgaagtggtatgaaaatttagttatttttttttttttttaagtggttagtttttaattatatttgggattttagttaggttttattttttttgggaaatttgttttgttttatttattaatttgttttggtttatatattttttttgtgtgttttattatagaatgagtattgtattgtaattgtatttaagagtaaggtttttatttatttttattattgaattagatacgattagtttagcgtttggtatagagtaaatgtttaataaatatttgttgagtggttttgggtatttgattagtattgattaaaggatgaataaaaaaattaagttaggattaaatttagtttttgaaaagttatttaaaaattatgttttgatattttgattttgagattgttttggtgttgggaataaaaagataaataagatagagtttgtttttgagatgttgttggtttttggaaggaagattttaggaataagaaaggatagtagtggtgaagtgttgtttattagaggtaagcgtagagtttttttttttttttttttgagatggagttttattttgttgtttaggttgaagtgtagtggtacgatttcggtttattgtaagtttcgttttcgttttttaggtttatgttatttttttgttttagtttttcgagtagttgggattacgggtattcgtttgtttaattttttttgtatttttagtagagatagggttttatcgtgttagttaggatggtttcgattttttgattttgtgattcgttcgtttcggttttttaaagtgttgggattttaggcgtgagttattatgttcggttggtaagtatagagttttataggaatattaggagagaataaattggggatgggattgaggaatgtggaatagaggaagtgatatttgaggtaggttttgagggaagatgagtagttagttagatggaaaagaagaggaagatggtgtgttattattatttgttttagtgataggtgtagtgatgagaggtgatggggttatgaagacggggagtttattagagtttagggtttgaaatttgattgtagtgtgtatgaaggtttaggtgttaggagggaagtttttttaagagaaggttttttatttgtttcgtatttgagtaggttttatattaaagtagggtttgaggatgtcgatgttggcgtataagttgaaggttttggaggtttgtttttttttagtttgttatatttgaagtaaggaagatgggtataggtattgtggtattgttggttttagattttgttgtttatttttcgtttgatttttatatggttttaattggataatttggggcgaatattattaatattaattttagaatacgggatatatttaggtttatttttttatttgtagaggatttaattttgtttatttgatttgttatttgtcggtttagttgttttttaaagttttttatgtttaggaattttttatttttttttttagtagtagttgtattagttgtattagcgtttatttttttttcgcgtaggcgttgatgtagtttatttatattttcgaagttagagtttgaggtattatttatgttttttatgttaattatagttgagttttcgttttgtgaagataatggtttttagagtgtaggatttttttgttttatttattaagttttttgtttattttagggtttagggttttgtttttttattgttgaggatacggtttggaattattatagattatgttattttatttttttttatatgtttttagaacgtttggtttttagttttggttattttttttagtttgggaaatttattagttttttatttatgttttttttttatgttatttattaaagattaaaaggttgaaaaagtgtttattttttttttttttaagttttaaataaaattatatatatagtatgtttttagcgaatgttagtgaattttatttaattttattttatgttttatttcgattaattttttaatttgttttaagaatattttttttttaatgtttcgggcgggttttgaaattcgagatttttaggttggagtagtagtttggtttttttaggttaatgttaattttattgattttagtgtgtacgaagatttaaagaagagagttttgtaaatggagcggatttttaggtttagagggggaatttttaagatatttttggatatcgtcggtttttcggttgttggtagttggtgttttggggttattatttggatgtttttttcgaattttttttatttcgggttagttttatttcgggcgtcgttcgtcggcgtcgttgtagttgttatgttttttgagggttttcgtcgttgaaattcgcgttagtttcgcgcgcggagtgggtaagatgtgggttttcggaaggtagacgtttagggtcgaggagaggtgggatcggtcggaatataaaaaggagaagttcggatgtttggataaaagtaattttcggaagttggggacgtggacgggggcggggaaaaatttcgcgatatttaagattttaggaggcggtgcgttgttacggagacggagtagggttattaggacgtacgcgcgagatagaatttttagtttcgtggagagattgaagatggcggttttttaggcggtggaggaaatgcggagtcgcgtggttttgggggagtttggggttcgtaatgtaagttttgtggttttgagttcgggcgggaggaatgagagcggaatagggatgggttttgggattggcgtggggatagttgtgggtttattgttttttcgtggataaattcgtttttttgttttagg

SEQ ID NO: 52 - DNA, 5219 bp, Artificial Sequence
  chemically treated genomic DNA (Homo sapiens)
tttagagtaaagggacgaatttgtttacgaagggatagtgagtttatagttatttttacgttaattttaagatttatttttgtttcgtttttatttttttcgttcgagtttaaggttataaggtttatattgcgaattttaaatttttttagaattacgcggtttcgtattttttttatcgtttgagaagtcgttatttttaatttttttacgagattagaggttttatttcgcgcgtgcgttttagtagttttgtttcgttttcgtggtaacgtatcgttttttggaattttaaatatcgcgagattttttttcgttttcgtttacgtttttagttttcggaagttgtttttgtttaaatattcgggttttttttttttgtgtttcggtcgattttattttttttcgattttggacgtttatttttcggaggtttatattttgtttatttcgcgcgcggggttagcgcgggttttagcgacgggagtttttaagggatatggtaattatagcggcgtcggcgggcggcgttcgaaatggagttggttcggaatggggagggttcgaagaaaatatttaggtaatggttttaaggtattagttgttagtagtcggagggtcggcgatgtttagaagtgttttggggattttttttttgggtttggaagttcgttttatttataaaatttttttttttgggttttcgtgtatattaaagttagtgggattaatattgatttgaaagggttagattattattttagtttgaggatttcgggttttagggttcgttcgaggtattaggaagaaggtatttttggaataagttaggaggttggtcggggtaaggtatggagtggggttgggtgggatttattggtattcgttgaaaatatattatgtgtatagttttgtttggggtttaggaaagaaggaaatgggtatttttttagttttttagtttttgataggtaatataggagaaagatatgaatggaagattagtaggttttttaggttagaaaagatagttaaagttagaaattaggcgttttgagagtatatgagggggaatggagtggtatgatttgtagtgattttaagtcgtatttttagtagtggaagaataaagttttaaattttgggatgagtagaggatttaatggatggaatagaaaagttttgtattttaggagttattgtttttatagggcggaggtttagttgtgattgatatggagaatatggatgatattttaggttttagtttcgaggatatgggtgagttgtattagcgtttgcgcgaggaagaagtagacgttgatgtagttgatgtagttgttgttgaagaggaggatggagagtttttgggtatgaagggttttaagggatagttgagtcggtaggtggtagattaggtaagtaagattgaattttttgtaggtagaaaagtagatttaggtatgtttcgtgttttggaattggtgttggtgatgttcgttttaggttgtttagttagaattatgtagaaattaaacggaaaataggtaataggatttagaattaatagtattataatatttatgtttattttttttattttagatgtggtaggttgggaaaagataagtttttagggtttttagtttgtacgttaatatcgatatttttagattttattttgatgtggagtttgtttaggtgcgaagtaggtgaggagtttttttttgaagaagttttttttttaatatttagatttttatgtatattatagttagattttaagttttgggttttgatgggtttttcgtttttatgattttattattttttattattgtatttgttattgaaataagtaataatagtatattatttttttttttttttttatttaattgattatttatttttttttaaaatttattttagatgttattttttttgttttatattttttaattttatttttagtttgtttttttttggtgtttttatagaattttgtgtttgttagtcgggtatggtggtttacgtttggaattttagtattttgggaggtcgaggcgggcggattataaggttaggagatcgagattattttggttaatacggtgaaattttgtttttattaaaaatgtaaaaaaaattagataggcgggtgttcgtagttttagttattcgggaggttgaggtaggagaatggtatgaatttgggaggcggaggcggagtttgtagtgagtcgagatcgtgttattgtattttagtttgagtaataaagtgagattttattttaaaaaaaaaaaaaaaagaattttgcgtttgtttttaatagatagtattttattattgttatttttttttatttttggaattttttttttagagattaatagtattttaaaagtaggttttgttttgtttatttttttatttttagtattagaatagttttagaattaaaatattagggtatagtttttgagtgattttttaagaattagatttaattttggtttggtttttttgtttattttttaattaatgttaattaaatatttaggattatttagtaggtatttattaagtatttgttttgtgttagacgttaaattaatcgtatttggtttagtggtgaagatagatgggagttttgtttttgagtgtagttatagtatagtatttattttatgatggggtatataggagggatatgtgagttaaagtaggttggtgggtgggataggataagttttttagaggaagtaaaatttagttaaaattttaggtatgattaggagttagttatttgagagaagagggaagtgattaaatttttatattattttatatatattttttaagaaaatattcgaaagtgtttggaggtatagataagtaggaagaggaggcgtttttattatttttttagtaatattttttattttaaattttttatttagtcggttagattttttttagggtttttttattataattttgaattttgggtattttttgttgaggtttgtttgttttgttatgtttttgttttgttttgttttgagatggagtcgtattttgttatttaggttggagtgtagtggcgcgatttcggtttattgtaattttcgtttttcgggtttaggtaatttttttgttttagttttttgagtagttgggattataggcgttcgttattatgtttagttaattttttgtatttttcgtagagatagggttttattatattggttaggttggttttaaatttttgattttgtgatttgtttgtttcggttttttaaagtgttgggattataggcgtgagttatcgcgtttagtttgtttgtttttttaaggggagggggtagacggatatatggtcgggtttttttttaaggtttagtagggttgagttttttatatagttgttgttttagttagttaagttttagagggttgttttttttggaagtaattttaggggtaaggaaatgatttttttattttttatttgtttttattattttgttttatcgtgttatttaatatgttttttaggttaggttttattttttggagttagagatgaataaaatttaggttttgttttttagaattttatggttttgtgttgtttttgttttaattttttttttttttttttaggtttttggagtttatgatttttattaagatggttaattttttttaggtgaatagagggtggtatgtttggagagtcgggggaagtattagggtagagggtgggattattaggtaaattttgggaagttataaatagatgagttgttgtattttttagtttgaatgaattggtatattgatagaaaattgtaggtgaattttatggattttttatgttggtttttattttggttgttattttattttatgggatgaagacgtttgatattattatcgtaagtaggatagataattttgggggggtggttgtattaggttgaaagttgtttgaggatataatggtggagtgagataggaatagtttttgcggaaggttttaggtgaggttgagattagaggttttttaggattaaatagagtttttattttatagcgggagggtattttgatgggtatagttattggtatttgtttcggttattggttgggagttttattttttatttatttttttgtttatttgtgtaacgtttagattattatgttgtagatgttggtattgttggtaaggagttaggtgtggtgggtaagagtgatgttaaaaagagtagttaggttttggtcggtatttgttttggggttttaaagtttggaatgggaggagtaggttaatggattatgtgttttttagggtttttatgaggggttagaaagtagtttaatttgaatgatttttttttttattatttttttttttagggttatggtttttttgggtattgtattgttttgtttattatttataatatttatttttacgtttttttttattttttttggttgttggtgggtggattgtttatattgcgtatggtaagttgggtaagaggtttttaggggtgggttgtttttttagggagttggggaagatagtttggagttgtttattttataaagagttttaaatgggagggaagagtttaaagatggttttgttttgggtgggggtgttttgtttttattttttattttggagttaggttttttgagttgtatttttatggttttaggtagtagtgttggtgtttcggatcgtgggttttatatagcggttgtttttttgtggtattttggttgttttatatatgttttttttgttttatttgtattttgtttattataaagtggtagagggtaagtggtaggaaggtttgggtgggggagaatgggaaagtagttgtttagagtaagaagttagatatgatggttggtgggttgggtttatttgattttcgtttattttttattttttttttagggattttggatatattggagggttttaatatttcgtttatttagagggtttttagagatatttttgttatgttttttgttgttcggttttttattatcgtttttaacgttatagttaaagttgttgcggtgattttgtagttatattgattttatttgaaatttttggttagttttttttttcgtagttgtagagaggaggaagattattaaaggatagttttgatga

SEQ ID NO: 53 - DNA, 5610 bp, Artificial Sequence
  chemically treated genomic DNA (Homo sapiens)
tatattatagatttatttataagaagatagatggaattattttttttttttgaattttagaattttaaggaagttaatttgagtggtttagtttggattaagtgtttattttggtttaaataattgtagtagtatatttgtgtatttgtgtattttgtttttttataattttgtagttcggggaaagtgtgtagatggatgggtttttgaaaagtaagagttgtttagataacgttagaggtgtttagttttgggagataagagttgggttaggttgataattagtttaagagagtcggaattagatgaataagaattagattttgggtgataatttagattaagagttttgaggtttagttattttaaaaagtttaagttttattgttttttggttttttggttaagattatgtgtagtatttgtttttattagtttaatatttgatatattttttatttgaggataatataataaatagatttttggagtaaggagatggaataggagtttgttttgtttattttatatattggtttggattgtagtatttttaggaatggtgtattttttttattatttttaaaaagtttaagttttaagaggtagtttggaaaaaagtgtttttggatttatttatatttttttttttaagatggagtttcgttttgttatttaggttggagtgtagtggcgttattttggtttattgtaatttttgtttttaggatttaagtagtttttttgttttagttttttaagtagttgggattataggtgtgtgttaattatgtttagttaatttttttatttttagtagagatagggttttattatgttggttaggtaggttttaaagttttgattttaggtgatttgtttgttttggtttttcgaagtgttaagattataggcgtgagttattgcgttcggtttaatttttgtaattttagtagagacgagtttttattatgttgattaggttggtttcgaatttttgattttaggtgatttattttcgttttcggttttttaaagtgttggtattataggtatgagttatcgtttttggtcgggtttgtttatattttggagatgttgtatattatgtttttttttttaagagttacgtaagtatttatatatggaagattttgagaaggtatttgggaaaaaatttgtttaattgtaaatataataatgtatgtatttgtatgtggagttttttttttagtggattatttataaatcgtttattgtttttaatgtatattttggagatagatttatattattagtttttatttgttagttatttttataagggttgggatggtttatgagtgaatagttttgatttaaagtagtgttttttaaattttatttatttgtttatagtttttttggagtttgttttatatgttcgttttgtgtattatttttatatgtttttatgtaaattaattatttttttaaaaagttttattttagttatatttttaaaataatggttatttttttttatatatatcgaaatatatatttattagaattaaaatgtttgtttatgtattattaataatttttttaagtattatatggtggggatatgtgtttgaagtgttaggagttaggagtggtttttgtaagatagagtaagttagttaatttttgagtattgttagttatatatgttggtagagaagtttagtttgtgataagattgttcggatatttttatgtttgtgtacggggatgttttcggtttgttattgtgaagtttgtgttgtttttatgtttatttagttttttttggaggggtttggaaagtaaatgtaggttgggtatagtggtttatgtttgtaattttagtattttgggaggtaaaggtgggtagattacgaggttaggagtttgagattagtttgattaatatagtgaaattttgtttttattaaaattgtaaaaattagttgggtgtggtggtacgtggttgtaattttagttattcgggaggttgaggtaggataattgtttgaatttaggaggcggaggttgtagtaagtttagatggtattattgtattttagtttgggtgatagagattttattttaaaaaaaaaaaaaaaaagaaaaaaaagtaaatgtagattttttttgggaaacggggggttgggagagtggagtagtgtggatgtattgttatttttgaaggtcgtttttaaattattttggatttattgtagtaagtagatgttttattttttggttagggattgattttgagatgggaagagtatgagaagagatattaatagtaaggtaaaattggttttggtagtttgttttagagaaagagtatagttttggagttaggtcgatttgagtatgaatttaagatttagtatttattaggtgtttgtttttaaattattattttttgatagttattatatatttataatgattattatggagtggatgaggaaatagggatttagagaagttaaataatttgtttgatattatataggtaataaatagtagagtagaatttaaatttaagttgatttgatttttaaatgtgtgtttttaattaaagtagggtaatttgttttgatttgtttattttttgagtattttttttgtaggagggtttgttgttgggtgttgggaatttagtggtaggtaagatggataagattttttttttttatagattttgtttgttataggggaaatagataggaaattaattattatatttgtaatttaataataagtgttataagtgttataaaggagatagatattataaggtattttttatttttatttgtttatttattttttgagatttattcgttttgttgtttaggttggggtatagtggtgcggtttcggtttattgtaatttttgttttttaggtttaagcgatttttttgttttagtttttcgagtagttgggattataggtgtgaattattatattttgttaatttttgtatttttagtagagatagggttttattatgttggttaggttgttgttgaatttttgattttaagtgattgatttatattgattttttaaagtgttgtgattataggcgttagttatcgcgtttggtttataaggtatttttggttagttagtggaagtagggttagtagtgcgtcggagagttattttgaaaaagtgatatttaggttgattttgaagtatttataagatgtggtaaatatatttaatggtaaatatgtgatggtaaatattagatgtgataaagatattgatggtttattggatgaatagtttttatatttatttttaaatgattttatagatattattttatagataatatttaggatgaaggtaaataaaaaggagattaattaaaatatgaaataataatagtgaaagtggtaatagatgtggtaatatttataaaggagtaatggttagattagtatattgagaagattattttggtaattgttggaatgtagtttacgagagggttaagaatggaagtagtaatttttgttagaagtgtagtgttttggagtgcggtgttttttgttggtttgttttttgttttttttaaattaggttttattttgttgtttaggttggagtgtagtgtagtttcgatttttttttcgggtttaggtgatttttttattttagtttttcgagtagtcgggattataggtatatgttattatatttcgttagtttttgtatttttttgtagagttagggttttgttatgttgtttaggttggttttgaatttttgggtttaagtgatttgttagtttcggttttttaaagtgttaagattataagtgtgagatattatttttagttagtatattgtattaatttaagtaggagaacgtagattttaaaggtttatgggtagtagagagaagtagatgaagtaaagagatgtaattagcgggattagtgggaaatgagggaaaggaaggtgttaggatggggttttttttagttgagtggagtttagtttatttttagagaagtttgagaggtatttaattatagatgtaaggtagttggttgttggttttttgtttttaggatagtttgatttttgtaatataggcgattttatagagttattgtgagaatttagagttgggtatagaatagatgttttataaacggtagttttattttttatttgtttcgtttttttagtatgttagggatataggggcggatagagataggtttagttttttttggttttttgtattttttttttttttagtataatttttgggtttatagcggatgtttaataagtatttgtagaatgaattaaagaaattagatttttggtgatttagggttatatgtattcggcggaaaattggggttaaatcggatttttggttggttgaaaaattaaaataatttttaaaaagtgggcgtgaaataatttagaagttggagggtttggataaaggttggggaggggattttttttattaggcggttttagggtcggtttagtaagaaaggaggcgttggggagatttttggggttttagttgttaaggtattcgtcgttttaaggagatgcggacgtcggatattagttttgtttaagattgttgggtttcgtcgcggtttttaaaggtttattacgtggttgcgcggttagttttggttcggaggcggtgttcgggtggcgtttgcgtattgtttagtagaggggttggggtttcgagaaaaagcgtttggagaggaaggggaggttgtttggggtgggacgtcgtgggaggagtcggttttttatgtaaattatagcggagcgcgtacggttcggaggcggggtttgcgatgtaaagataggttcgtttggcgaatagcgagggggcgggtcgtaattttttgttttttttcgcgagcgttgacgtcgtcgacgtgttgtttaaaagcggtcgcgtaggcgtagtgagtttaaatgcgaatttaggttgttatataattgttggggtttgttttcgtcgttcgttcggtagttaggtagcgtcgtcgtcgtggtagtagttttagtcgtttttggagtttcgggtttatagttatcgtcgtttatttgcgttttttcgagttttcggagttttcgttcgttcgtataggtcggttcgtcgtttgcgttttttttacgtcgtttcgtttgtcgtcgcgttcgttttttcgggtcgatatgagtggggattatttttataacgatttttaggtacggttcggtttgattttggcggtttcggatttcggtttggtcgtttcgcgattttcggcgtaggtttcgattttagtttcggttcggtagttttgataggtcggagttttcggtgaggggtcgtttgtcggagtagatcggttcgttaggtcgcgagcgagggtcgcgaagttatagttcgaggtagggatggttgttttttgtggttattttcgggttttcgtttttttcgggggcgtagggtgagttagatttcggtcgcgcgcgttcgtcgtcggaggggttaaagtggttgttgtttgatattttttttttttttttttttaga

SEQ ID NO: 54 - DNA, 5610 bp, Artificial Sequence
  chemically treated genomic DNA (Homo sapiens)
tttggaaaaagaaaaggagagaatattaaataatagttattttaattttttcggcggcgagcgcgcgcggtcggggtttggtttattttgcgttttcggggaggacggggattcgggggtggttatagagggtagttatttttgtttcgaattgtaatttcgcggttttcgttcgcggtttagcgagtcgatttatttcggtaggcggttttttatcgggggtttcggtttgttaaagttgtcgggtcggggttggggtcggggtttgcgtcgggggtcgcgggacggttaggtcggggttcggggtcgttagggttaggtcgggtcgtatttgggaatcgttgtggaggtggtttttatttatgtcggttcggagggacgagcgcggcggtaggcgaggcggcgtgggggagacgtagacggcgaatcggtttgtgcgggcggacggggatttcggaggttcgaggaggcgtaggtaagcggcggtgattgtgggttcgagattttagaaacggttgaggttgttattacggcggcgacgttgtttgattgtcgggcgggcggcgagaatagattttagtagttgtgtaatagtttaagttcgtatttgggtttattgcgtttgcgcggtcgtttttaaataatacgtcggcgacgttagcgttcgcggaaagaggtagagggttgcggttcgttttttcgttgttcgttagacggatttgtttttgtatcgtaagtttcgttttcggatcgtgcgcgtttcgttgtgatttgtataaggagtcgattttttttacggcgttttattttaagtagttttttttttttttttagacgttttttttcggaattttagtttttttgttaggtagtgcgtaggcgttattcgggtatcgttttcggattagggttggtcgcgtagttacgtggtgggtttttaaaggtcgcggcgggatttagtaattttgggtagagttggtattcggcgttcgtatttttttggagcggcgagtattttggtagttgggattttagaggtttttttagcgtttttttttttgttaagtcgattttgaggtcgtttggtgggaggagttttttttttagtttttgtttaggttttttaatttttggattattttacgtttattttttaaaaattattttaattttttaattaattaagggttcggtttaattttagtttttcgtcgagtatatgtagttttgggttattaagggtttgatttttttggtttattttataaatatttattgagtattcgttatgagtttaggaattgtgttgagggaagggggaatgtaagagattaaagggaattgaatttgtttttattcgtttttgtatttttggtatgttgggaggacggggtaaatggggaatagaattatcgtttatagagtatttattttgtgtttagttttgaatttttataatagttttgtgaggtcgtttgtattataaaagttaaattgttttaaagataagggattaatagttagttattttgtatttatagttggatattttttaagtttttttgggaatgaattgaattttatttagttagaaaaagttttattttgatattttttttttttttattttttattagtttcgttgattgtatttttttgttttatttatttttttttgttgtttataagtttttgaagtttgcgtttttttgtttggattaatataatgtgttggttgggggtggtgttttatatttgtaattttagtattttgggaggtcgaggttggtagattatttgaatttaggagtttaagattagtttgggtaatatggtagaattttgattttataaaaaaatataaaaattggcggggtgtggtggtatgtgtttgtagtttcggttattcgggaggttgaggtgggaggattatttgagttcgaggaggaggtcgaggttgtattgtattttagtttgggtaatagagtgagatttggtttaaaaaaaataaaaaataaattaataaaaaatatcgtattttaaaatattatatttttaatagggattgttgtttttatttttggttttttcgtaaattgtattttaataattgttaaagtgatttttttaatatgttaatttaattattatttttttgtggatattgttatatttattattatttttattattattattttatattttaattgattttttttttatttatttttattttaagtgttatttgtgaaataatatttatgaaattatttggaagtaaatatgaaaattgtttatttagtggattattagtatttttattatatttaatgtttattattatatgtttattattagatgtgtttattatattttgtgaatgttttaagattaatttaaatattatttttttaaagtgatttttcggcgtattattgattttgtttttattggttgattaagggtgttttataggttaggcgcggtggttaacgtttgtaattatagtattttgggaggttaatgtggattaattatttgaggttaggagtttaataatagtttggttaatatggtgaaattttgtttttattaaaaatataaaaattagtagagtgtggtggtttatatttgtaattttagttattcgggaggttgaggtaggagaatcgtttgaatttgggaggtagaggttgtagtgagtcgagatcgtattattgtattttagtttgggtaatagagcgagtgagttttaaaaaataaataaataaataaaaataaaaggtgttttatagtatttattttttttgtaatatttatgatatttgttattaagttataaatgtagtaattggttttttgtttattttttttatagtaagtaaggtttgtgagaggggggaattttgtttattttgtttattattgaatttttagtatttagtaataggtttttttatagaagaggtgtttaagaaatgggtaaattaaagtaggttattttgttttggttaggagtatatatttggaagttaaattaatttaggtttgaattttgttttgttgtttgttatttgtgtgatattaggtaagttgtttaatttttttgagtttttgtttttttatttattttatggtgattattgtgggtatgtaatgattattaaaaaataatggtttgagggtaggtatttagtaagtgttgagttttggatttatatttaggtcggtttgattttaaagttatattttttttttgaagtaagttgttagagttagttttgttttgttgttggtgtttttttttatattttttttattttaggattaatttttggttagaagatgaggtatttgtttgttgtagtgagtttaagataatttgaggacggtttttaggaataataatgtatttatattattttatttttttaatttttcgttttttagggagaatttgtatttgtttttttttttttttttttttttttttgagatggagtttttgttatttaggttggagtgtagtggtgttatttgggtttattgtaattttcgttttttgggtttaagtaattattttgttttagtttttcgggtagttgggattatagttacgtattattatatttagttaatttttgtaattttagtagagataaggttttattatgttggttaggttggttttaaatttttgatttcgtgatttgtttatttttgttttttaaagtgttgggattataggtatgagttattgtatttagtttgtatttgttttttaggtttttttaaagaagattaggtaggtatgaaaatagtatagattttataatggtagatcgaggatattttcgtgtatagatatggaaatattcgggtagttttgttataggttgaatttttttgttagtatgtgtggttggtagtgtttagaggttgattgatttattttgttttatagagattatttttgatttttaatattttaaatatatgtttttattatatggtatttgaggagattattgatagtgtatggataagtattttaattttaatagatatgtatttcgatgtgtatgagaaaaaataattattgttttaaggatataattgggatgaggttttttaaaaaagtgattgatttatataaaaatatataggaatagtgtatagagcggatatataagataaattttaggaaggttataggtaaataaatgaggtttgggaaatattgttttaaattaagattgtttatttatggattattttaatttttataaaaataattagtaggtgaaaattggtagtgtaggtttgtttttaaagtatgtattgggaatagtggacggtttatagataatttattaaaagaagagttttatatataaatatatatattattatatttatagttaaataggtttttttttaggtgtttttttagggttttttatatgtaaatatttacgtgatttttgaaaagagggatatggtgtgtagtatttttaaaatgtaggtaaattcggttaggagcggtggtttatgtttgtagtgttagtattttgggaggtcgagggcgggggtggattatttgaggttaggagttcgagattagtttggttaatatggtgaaaattcgtttttattaaaattataaaaattaggtcgggcgtagtggtttacgtttgtaattttagtatttcgggaggttaaggtaggtagattatttgaggttaggattttgagatttgtttggttaatatggtgaaattttgtttttattaaaaatagaaaaattagttgagtatggttggtatatatttgtaattttagttatttgggagattgaggtaggagaattgtttgaattttggaggtagaggttatagtgagttaagatggcgttattgtattttagtttgggtgatagagcgagattttattttggaaaaaaaaatgtaggtaaatttaaaaatatttttttttagattattttttgagatttgggttttttgggggtggtagagagggtgtattatttttggaggtattgtaatttaggttaatgtgtagagtggatagagtaagtttttattttatttttttgttttaaaaatttatttattatattatttttagatagaggatgtattagatattaaattggtaagaatagatattgtatatgattttagttagaaggttaagaagtaatgagatttgagttttttgaaatgattgaattttaagatttttgatttaggttgttatttaagatttagtttttatttatttgatttcgatttttttaggttagttattaatttggtttaatttttgttttttagaattgaatatttttagcgttgtttaaataatttttgttttttagggatttatttatttgtatatttttttcggattgtaagattatggaggaataagatatataaatatatagatgtgttgttatagttgtttggattaggatgggtatttgatttaagttgagttatttaggttaatttttttaaggttttagaatttagaagaaaagagtggttttatttgtttttttgtggatagatttgtagtatg

SEQ ID NO: 55 - DNA, 11015 bp, Artificial Sequence
  chemically treated genomic DNA (Homo sapiens)
gtgggtcgattatttgagattagtttggttaatatggtgaaattttgtttttattaaagatataaaaattagtttggtatgatggcgtacgtttataattttagttattggagaggttgaggtacgagaataatttgagtttaggaagtagaggttgtagtgggttgagattatattattgtattttagtttgggtaatagagtaagattttgtttttaataataataataataaaaaatatataaaataaaaaaattcgtaaatgataggatattagtttggttgtttagttattttttatttttatagatggttgatttaattataagtatttttaggtagagtgaaaaaaattaagggttagtaagattggtgttcggaggtgagagttttgaaagagagtttattatgtgagtagtgggtttgagtgaggaggtatatttttgggtcgtggtgtttagagtgtagagtttttgtagcgtaatattttcgaggataggaaggttataattatcgaagatattttttttgttcgtgatttttaaagttgggttttaggtaggttttagtttgtttgtttgtgtcggtgtcggttttattttttgagtgttttttagggttaagtattgtattgtgttgtgtttttttggatatgtattaaacgtggattttttcgatggtttttaggtgggtttcgggagttttttagaggtgtttaatatgattgggtgattgaatgagatggttggttcgaatttagatagcgagtggtggtatattaggatttgatttagattatttattgttttcgttaattgttatagtttataatagttttattttattatatttttaggtggcgtttattgtttattttttttaggaattttttgggtgagttgtagtttattttattttcgtttggtttcgtaggggattttttagggtgtagggttttttatatttgttcgttgtattttatgtttgtgtaggatgttggaggtagatgtttttagtatttaatatttgtacgtgttttgaaggttgaaagagtatttatagggatagtagtttaattttttttttcggagttatttgttttttttgatgggttttttgtttttatagagagatgttttttgtagtcgggttggtaatggcgatagataaattttatgttttattttatattaatcgaattagaatttcgagggtttgtgatttaggaatttatgattttaaaaatttttcggttaggtacggtggtttatatttgtaattttagtattttgggaggttgaggtgggtagattatttaaggttaggagttttagattagtttggttaatatggtgaaattttgtttttattaaaaatagaaaagttagtcgggtgtggtggtaggcgtttgtaattttagttatttaggatagtgaggtaagagaattgtttgaattcgggaggcggagattgtagtgagttaagatcgcgttattgtattttagtttggggtataagagcgagatttcgttgtaaaaaaataaaaataaaaataaaaattttttttaataatgttgatatagttcggggatagatggggattggtaattatttaggaattgtaatttttttatatgatagataaggaaatagaaattagagagggggatgatttgttaaaagtaatatagtggtaggaattgggttttgtttagaagttaggttttttgattttggttttattatattaatatattttatttttatttggttaaggtttttttttattatttggaattagttatttttgtaagttaataagtttttatttttgaaaatttataatgtgtaaaggggaggaggtttaatgttttacgggtttagcgtagtagttatagttggggataaagatagttagtgtagttacgagttttttgattatggttttatttttttttaggattataagtgtttttttattgagtagggagtagatggttgggtgggtaaaggggtattggcggatgaattttaaggcgttttggttagttttttttttatgtttatcggaagataggttagtaggataagtagaggggattttgtttgagttggtggacgttatattgtttacgtagttggtggtgtttgagtagttgtttaggttggttttattgatgtttcggttagttagtaggtggttcgggtttagtttataagcgggaaattttttataattgttgtttcgggaagaagggttggtattttttattgaaaagtttatacggaatttttggtttttttgtttgtggcgttgtggggggttgtttattattttattttcgttagagtgtgtgtgggttggagtggagggtagtattaattgattatcgtttttttttttaatatagtaggaggagtttatttgtgatggggtgttttttatgttgtttttttttgttttatttagttttggaggattgatgtttgtttggaagcggatggtttttttattgttatttggatatgatttttttttattaatggtatttgggtagttggttttaaagttattagggatgagggttttagaggggtaggtattgaggattttaatattgttttcgttgatggttttgtggttgattgttttgtttcggattatttgggggtttaatggtattgtgaggtttgtttggttgttagatttagaaagtacggaggtggattttttcgtgtttaaaattttaatatttttattattgttgatatttttttttatatttatatttaggtagtttaagtttttttgggggtcgaaattgtttaatttagttatttttatttttttgtattttttattttttagtttttgttttattttgattaatatagattttatattggatttgtaagaattaatattaattaatattttaggaattgggtatttttttagagaattggaaggcggtttgttttgattgggtttagagggtatgtttttttgtttttttattattttgttatcgatttttataaagtttttaaagagaaagtttgttatatgttgttgttttagaagtgttttattaatttgattggttaggaggtaatataggttttttttgaatatgtgtttaatgtggttgagttgagttagggtttgggtgaaatatttagtgttatagagtttttttaaggtttttaattttttgttaaaatatttggtggattttgttttgataagttttggggtgtaggttggtttgtaggtgtaaaggtttgtgtcggtagatttattagggttagaggtagtggatgtttggttggtttgattttggatgtgttttattttattaggatataaattatgtttttttaattttcgatgagggtatgagcggatttgttttagtaggttttgatgtttaatgatggatttttttatattggttagtttattggtttttttaattgtttgagatgagtaaaagtttttgtcgttggtttttttttggattttcgtttttgtgtgtagtattgttttggtgtaatttaagttttttagtttttttttaagttttttagtaaatgtttttttgttgttagtttttaagtatttagaagttttggaaaattcggttgaaagtttttggaattgttgtatgattttatgttggtttgtagagatataagttatgtaaaacggttttacgaagttacgggtttttaggtcgtatagggtaaggtggtgtacgtatgtaaaggcgttttttttagaattttttagtattattttggagttttttacgaagtttagtttggggtaggtagatttaggaggatggtttacgaaggaagtttggtaatttatagatatgatacgtagggagaagtaattgagattaaaagtgttaaaaattttggtgttattggggatggttagtaagggttggggttttatttgtttagagaattcggaaataagaatgaagtttttcgaaaatttggtttcggatagttttgattaggggttagtattttgattggcgaaggggaagagcggtatcgagtattttttaggtagggtcggtttattgtaaggtttttttttatattttttttttttggtgaaggttattacgttaggggcgttgattatatttttagatatatgaagaaaatattgagaggaagtgggaaagaatgcggtgttaatcgacgcgtagaaggtaggttttcggagaaggaagtgaagtttttacggttttttttgcgatttttcgaattcggggttttaggttgttttttatatattcgaggagaagaattttagtagtttttttatagttgtagttttttcggagttttttgaggttttatgaacgttaaggtcgtaggtttaattgtttttttttttttcgttcggcgagcgcggttagtataagaaatttgttgcgaaattatttgtatttttcggaatttattgcgatagtaaaagttttcgttttgaataaggtttaacgcgaggttacgggacgtcgtaggggttagttaagcgttgttgttttttattgttcgagggtagaaatcgtcgcggtttttaggacgttataattcggattttgttatcgcggcgtcgttattttgatattatatgatttttggtgttcgcgtcgcgtgattcggaagcgttttcgtagattttcgagtaggagattaaaaagttatgagaaagaggttttggatgggagtgtttggcggtttttcgtaagaaggagttcgattaattaattattgtcgggaaggaggggaaagaggggcggagtgagacgggggcggcgggaaggtggtagaggggaacgtgtttggacgaggggcgcgggatagtttgggagttgtagttttaggtcgttgtggggcgcgcgtttggcggaagtagttggagaaggcgggcggaagttttacgttaagatattggattcggtgttgaggcggcggttgcggtacgggaaaggtttagtgattgaagttttaaaggttagtaggttggtggggacgtgatcgaagcgaggttttggttttttttcggtgggcgttatttgagttttatttttggtttttttaggatgcgtcggtagtcggggagcggtttcgggcgcgaggtttgaggatgattttttttgtcgttcgttacgcgtttcggtggttgcgacggttcgaagatcgtgttttttttcgcgtcgttatggagatggtttttcgaggcgtgcggaaagttttttgtgtggtcgaaaaaaacgacgcggttaaggggatcgtcgatttgttgttaaacggtcgtatgaggcgggtaagaaagcgcgtttcgattagttgcgtgttttaagggaggtttatcgagcgggatagcgtggtgggcgttaagaatcgagatgaaggcgattattttttattttttaggttttattgtttttcgtttggattattgtagtggttttttgtttgttttcggattggagtgtattttaaaacgtagttgatatattttatttatttgcgtggaaattttttgttttgtttgcgtttagtaggtttttaaatttgtttgattttcggaatcgtttcgggcgttggttgtttttcgggttttgtgtgaggttggggaagtgtgtattttattgtttttttttagagatttagaaatttatttgggaattattgattagatttttttaatttggtatttaagttttgttcgatcgttttttagttaatttagttttttttattttgtgttatagttattgtattttatagtttttgtgattttttagttttatagtgtatatttatagtaatacggtaaggtttggggattagatttgaagttagttttgtttttattcgaatgaattgattttgagagaggtaagtggtaagaatgtgttttatatatacgggaggtataaacgtaagggaggataagaaaaagttttataaaggaggtgttacgggagatataaagagttgtttaggaaaatattttagataataaaagtagattttgaaatggttttttggagaatttttttaagagtatgggtggaagttttttgtttatttttttttagtttttagggttttaagatttgtttttagattaaggatagtgggagtggagttagggttgtgtgaatgttggttgatagttttatttgtttttagtgttagaagttttggtgattagttttaaggtttgtttatttttagataatgaagtagatattgaaaaatggtttttttacgtttaattttttattttttaaggttttgttgaatttatttttttttttttttttttttttttttttttttaagtaatttagaggttttgtatttatttatttttattttattatattatgaatttatagggaataggttttagcggtttaggtttttttttattggtttttataaagtgtattttttttaatggaataggttggtattttaggtgaattttttttttttgatttgttttttttttgattatttttttttatatattttaggaaagattttggtttttagagtgtttaatatgtttaatagaaatattaattttttgggtaagaatttagtttttgttcgtagtagtgttaatagtatgttgggtaatatagatttttttagttttgttatgtaatatttgtgggttatttttttttgaatagtatgtatttttacgaagtttttaatattatttttattgtagattttggtgtttgtggttagagaaattttatatttttgttttgttttgtttgtttgttttgagatggagttttgtttttgttgtttagtttggagtgtaatggtgtgattttagtttattgtaattttcgtttttcgggtttaagcgatttttttgttttagtttttttagtagttgggattataggtgtttgttattatgtttagttaattttttgtatttttagtagttttattgtgttggttaggatggttttgaatttttgattttaggtgagttattcgttttagttttttaaagtgttagggttataggcgtgagttatcgtgtttagttcgaattttatgttttttataaggttaggagaatatatattagatgtttcgttttttttttttttgtgttcgttattttggtaaattattttaagatggtagttttagttaaaaggaaagattttttttggaaagagaatttttatttttatgtatagaaaatataatagtgtgtatttaatttagtttagtggtaaattttttagtttttgttttttttaggttggtaatgtaagttatagattttggatttagggtattgtttttttagtgatagtagattttatatgtcgttgtaatttgttttattagtttagttagagtttttttgtttattagaaagttaatttttgtgaaggtgatagtggtgtaggtttttttgtggaatttgatattatagttttgacggtgtagtagagaatttttattttaggatatagtataggtaggaagataattagtttaatgggatttattattagttgattttttatgttttttattaagttggtgacggtgttaatttttgttcgaagtgtaggtggttttttagtagcgatattttttttgttggaagttttttttttagtttgggttaacggtttcgattttattttttgttttgttttttgtttgtattgtgggttagtttaagtaattgagtagtttaagtttggtagtttgaggtttgggtgaattggttaattttaggtggtatattagttatttatagagtatagcggttttgtcgtagtagttatttatagcgggattatttgataaagtgggtgaggtttttaggttagatatttaatgttaaaattattagggttttttttaaatgggatttattatttttttggtttattgttgttttatgataataggggttagggttattttttttttttggttatttttttttttggtatttggggcggttagaggagagaggttgttgaaatgttttatttttaaggaattttttttttattatttgtttttttatattaggttagagatttttattgatatgttgttatagtattttattttatttgaaaggtatttattagttatagttaaataatgggatgtgcgattatttatttgatttttgttattgtttttttttggattttaaattttaaaggatagtgattatattttgttaattgttatgttttaacgtttaatatggtgtttggaatgtaggaaatttttaataaatattaatatttgggttgagcgtagcggtttatgtttgtaattttagtagttggggaggtttaagcgggtagattatttgaggtcgtgagtttaagattagtttggttaatatggtaaaattttatttttattaaaaatataaaaattagttaggtgtggtggcggggttttgtaattttagttatttacgaggttgaggtaggagaatcgttttaattcgggaagtggagtttgtagtgagtttagattgcgttattatattatagtttgggcgatagagtgagattttattttaaaaaaaaattaggttaggtatggtggtttatatttgtaattttagtattttgggaggttgaggtgggcggattatgaggttaagagattgagattattttggttaatacggtgaaattttgtttttattaaaaatataaaaaattagtcgggtatgttggtagacgtttgtagttttagttattcgggaggttgaggtagtagaatggtatgaattcgggaggtggagtttgtagtgagtcgagattgtgttattgtattttagtttgggtaatagagtgagattttgttttaaaaaaaaaaaaaaaaatttatagttgttgaatgtatgtttgagttgagtttgaaagttttattaggtagtagaaattgtaaagaataatttagtggtttgaaattgtttggtatatttagaaatagtgagaagttaggggtgtggtgtggtgggaagagatatcgatgagttaagtaagagtagtagttgagtgtagattataagaattttagagagttatgtaggttgagtggtaaaatgtatagaaaattgattattttaattattttgaagtatatagtttagtggaattttgtttattaaatgtgttattattattattatttagttttagaaggtttttttttattttaagaggaagttttatatttattaagtagttattttttttattttttttttagttttttataattacgaatttgttttttttttttatggatttgtttgttttgggtattttttataagtggatttatattttatatgtttttttgtgttaggttttttttatttaatataattttgaagtttatttatgttgtattatgtattaatattagttttttattttttttttttggtttttgagaaggagttttttttattgtcgtttaggttggagtgtagtgatgagatttcggtttattgtaattatcgttttttaggtttaagcgatttttttgttttagttttttaagtagttgggattataggtatttattattacgtttagttaattttttgtatttttagtagagatagggttttattatgttggttaggttggttttaaatttttgatttcgtgattcgtttattttagttttttaaagtgttggaattataggtatgagttattgtatttggtttttttatttttttttatggttgaataatattttattatatggatagattatattttattttattatatattagttgatggatatttgggttgtttttattttttgattattgtgaatagaatttttatagatattcgttgggcgtggtggtttatatttgtaattttagtattttgggaggtcgaggtaggtggattacgaggttaggagattgagaatattttggttaatacggtgaaattttatttttattaaaaatataaaaaaattagtcgggcgtggtggtaggtgtttgtagttttagttattcgggaggttgaggtaggagaatggtgtgaattcgggaggtggagtttgtagtgagtcgagattacgttattggattttagtttgggcgatagagttagattttattttaaaaaaaaaaaaaaaaaagaatttttatagatttttatgtataagtttttgtttgaatgtgtttttttgtttgttttttgttttttgagatagtttcgttttgttatttaggttagagtgtagtggcgttatttttatttattgtaacgtttattttttgggtttaagtgatttttttgttttagtttttttaagtaattgggattataggtatatattattatatttggttaattgttgtatttttagtagagatggggttttattatgttggttaggttggtttcggatttttgatttaaagtgatttaattgttttagttttttaaagtgtatttgaatgcgtttttaatttttttgggtaaatttgtaggagtggaattgttgtgatatgtgataattttgtaattttttgaggaaatattaatattttttagagtggttaaagtattttatatttttattgataatgtttaatttttttatatttttaataatatttgttattttatttgttttttttattattttatttaattattattttaatgggtatggagtggtattttattatggttttgatttgtgtttttttaatgattaataatattgagtatttttttatatgtttgttggttattttttattttttttggagtaatgttggttatatttttggtattataattaagaaattattgttaaatttaggattagaaagaattatataaaggaatttattgttttaaacgtaatttatattttttatttatttttgttttataga

SEQ ID NO: 56 - DNA, 11015 bp, Artificial Sequence
  chemically treated genomic DNA (Homo sapiens)
tttataaaataaaaataagtaaaaaatataaattacgtttaaaataatggatttttttgtataattttttttgattttgaatttggtaatgattttttggttatgatattaaaaatataattaatattgttttaaagaagataagaaatggttaataagtatatgaaaagatgtttaatgttattaattattaggaaaatataaattaaaattatgatgaggtattattttatatttattaggataataattaaatagaataataaaaaaaataagtaaaataataagtgttgttgaggatgtggagaaattggatattgttagtggaaatgtaaaatgttttggttattttggaaaatgttggtgtttttttaaaaagttatagagttattatatgttatagtaattttatttttataaatttatttaaaagaattaaaaacgtatttaaatatattttgggaggttgagatagttggattattttaggttaggagttcgagattagtttggttaatatggtgaaattttatttttattaaaaatataataattggttaggtgtggtggtgtgtgtttgtaattttagttatttggggaggttgaggtaggagaattatttgagtttaggaggtggacgttgtagtgagtggagatggcgttattgtattttagtttgggtgatagagcgagattgttttaaaaaataaaaaataaataaaaaaatatatttaaataaaaatttgtatatgaaagtttatagaagtttttttttttttttttttttgagatggagtttggttttgtcgtttaggttggagtttagtggcgtgatttcggtttattgtaagttttatttttcgggtttatattatttttttgttttagtttttcgagtagttgggattataggtatttgttattacgttcggttaatttttttgtatttttagtagagatggggttttatcgtgttagttagaatgtttttaattttttgatttcgtgatttatttgtttcggttttttaaagtgttgggattataggtgtgagttattacgtttagcgaatgtttatagaagttttatttataatagttaaaagatgaaaataatttaaatgtttattaattgatgtatggtaaaatgaaatatgatttatttatatgatagaatattatttagttataaaaaggaatgaagaggttaggtgtaatggtttatgtttgtaattttagtattttgggaggttgaggtgggcggattacgaggttaggagtttgagattagtttggttaatatagtgaaattttgtttttattaaaaatataaaaaattagttgggcgtggtggtgggtgtttgtaattttagttatttgggaggttgaggtaggagaatcgtttgaatttgggaggcggtggttataatgagtcgagattttattattgtattttagtttgagcgatagtgagagagatttttttttaaaaattaaaaaaaaggaatgaagaattgatattaatatatggtataatatggatggattttaagattatgttaagtgaaagaaatttgatataaaagagtatgtaagatatgggtttatttataggaaatgtttagaataggtaaatttatggggaaagaaggtagattcgtggttgtgaggggttgaggagagggtaaggggagtgattgtttaatggatatgaggtttttttttggggtgaaaaaaaattttttggaattagataatgatgatggtggtatatttagtggataaaattttattgaattatatattttaaaatgattaaaatggttaattttttgtgtattttattatttaatttatatggttttttaagatttttatgatttgtatttaattgttgtttttgtttaatttatcggtgtttttttttattatattatatttttaattttttattgtttttgaatatgttaagtagttttaagttattaggttgttttttatagtttttattgtttggtaaaatttttaggtttagtttaaatatgtatttaataattatgaatttttttttttttttttgagatagagttttattttgttgtttaggttggagtgtagtggtataatttcggtttattgtaagttttatttttcgggtttatgttattttgttgttttagtttttcgagtagttgggattataggcgtttgttagtatgttcggttaattttttgtatttttagtagagatagggttttatcgtgttagttaggatggttttaattttttgattttatgattcgtttattttagttttttagagtgttgggattataggtatgagttattatgtttggtttaatttttttttgagatggagttttattttgtcgtttaggttgtaatgtaatggcgtaatttaggtttattgtaagttttatttttcgggttgaagcgatttttttgttttagtttcgtgagtagttgggattataggatttcgttattatatttggttaatttttgtatttttagtagagatggggttttgttatgttggttaggttggttttgaatttacgattttaggtggtttgttcgtttgagtttttttaattgttgggattataggtatgagtcgttgcgtttagtttaagtattaatatttattgaaagttttttgtattttagatattatattaggcgttaggatatagtaattaataaaatataattattgttttttggagtttagagtttaaggagaggtagtgataaaaattaaataaatgatcgtatattttattatttaattgtaattagtagatgttttttaagtagaatagagtgttatgatagtatgttagtaagggtttttgatttagtgtgggggaataggtggtgagggaaggattttttgaagatgagatattttagtagttttttttttttagtcgttttagatgttaaaaggaaagatggttaaggggaagaagtggttttggtttttgttgttatggagtagtagtaggttaaaaaggtggtaaattttatttgagaaaagttttaataattttggtattggatatttagtttaagggttttatttattttgttaaatagtttcgttataaatggttgttgcggtagagtcgttgtattttataagtggttgatgtgttatttgggattgattagtttatttaggttttagattattaaatttaagttatttaattgtttaagttggtttatagtatagataagagatagagtaagggatgagatcgaaatcgttggtttaggttgagaagaaagtttttagtaaaggggatgtcgttattaagagattatttatatttcgagtaggggttgatatcgttattaatttggtagagagtatgaagggttagttggtggtggattttattgagttggttgtttttttgtttgtgttgtgttttaagatggggattttttattgtatcgttaagattgtggtgttaaattttataggaagatttgtattattgttatttttataaaggttaattttttggtagataaaggagttttggttaagttggtgggataaattataacgatatatgagatttgttgttattggggaggtaatgttttgggtttaaaatttgtagtttgtattattaatttagaaaaggtaaaggttaaagaatttgttattaaattgggttaagtatatattgttgtgttttttgtatataaaaataaaaattttttttttaagaaaagtttttttttttggttggaattgttattttggagtaatttgttaaaatgacgaatataaaggaaaagaggacgaggtatttgatgtatgtttttttggttttatagaaaatatggagttcgagttgggtacggtggtttacgtttgtaattttaatattttgggaggttaaggcgggtggtttatttgaagttaggagtttaagattattttggttaatatagtgaaattattaaaaatataaaaaattagttgggtatggtgataggtatttgtaattttagttattagggaggttgaggtaggagaatcgtttgaattcgggaggcggaggttgtagtgagttgagattatattattgtattttaggttgggtaataagagtaaagttttattttaaaataaataaataaaataaaataaaaatatggagtttttttggttatagatattagaatttataatgaaggtgatattgaggatttcgtgagaatgtatattgtttaaaagggaatgatttataaatgttatatggtagaattggaaaagtttatgttatttagtatgttgttggtattgttgcgaataagggttagatttttgtttaaagaattaatgtttttattgagtatattaagtattttaagaattaagattttttttgaaatgtgtgaaggaaaatgattaaaaaagaagtaagttaaagagaaagggtttatttgaagtgttagtttgttttattgagggaagtatattttgtgagaattaatggaaaagagtttgagtcgttggaatttattttttatggatttatggtatgatagggtaaaaatagataaatataagatttttggattgtttaaaaaaaaaaaaaaaaaagggagagagagagaatgaatttagtagagttttgaaggataagaagttaggcgtaggagaattattttttaatgtttattttattgtttagaagtagataaattttggggttggttattaggatttttagtattggaaataggtaaagttgttagttagtatttatataattttggttttatttttattatttttgatttggaaataggttttaggattttgggaattaaagaaaaatgagtagggaatttttatttatgtttttagaaaagttttttagaaaattattttaggatttatttttgttatttgagatatttttttggatagttttttatgtttttcgtggtattttttttatgaaatttttttttatttttttttgcgtttgtgtttttcgtgtgtgtagaatatatttttattatttattttttttagaattagtttattcgggtaggaatagggttgattttaaatttaatttttaaattttatcgtgttgttgtaagtgtgtattgtgaggttggaaagttataagggttgtagaatgtagtggttgtggtataggatggggagggttaggttggttggggaacgatcgggtagggtttgaatgttaagttaagggaatttggttagtagtttttaaatgaatttttgaatttttagggaaaaatagtaaaatatatatttttttagttttatataagattcgaagggtagttagcgttcgaggcgatttcgagaattagataagtttgggaatttgttaagcgtaagtaaaataaaaggtttttacgtaaatgagtgagatgtattaattacgttttaaaatgtattttagttcgagagtagataggaggttattgtaataatttagacgaggggtagtgaggtttgagaaatgggagataatcgtttttatttcgatttttggcgtttattacgttgtttcgttcggtgggttttttttaaggtacgtagttgatcggaacgcgtttttttattcgttttatgcgatcgtttgatagtaggtcggcgatttttttggtcgcgtcgtttttttcggttatatagaggatttttcgtacgtttcggagggttatttttatggcggcgcgggaaaaggtacggttttcgggtcgtcgtagttatcggagcgcgtagcgggcgataggaaagattatttttagatttcgcgttcggagtcgtttttcggttgtcggcgtattttggggaagttagagatgaggtttaaatggcgtttatcgaaagggaattagagtttcgtttcggttacgtttttattagtttgttggtttttggagttttagttattgagtttttttcgtgtcgtagtcgtcgttttagtatcgaatttagtattttggcgtggaattttcgttcgttttttttagttattttcgttaggcgcgcgttttatagcgatttggaattataatttttagattgtttcgcgtttttcgtttaagtacgtttttttttgttattttttcgtcgttttcgttttatttcgttttttttttttttttttttcggtagtggttggttaatcggatttttttttgcggggagtcgttagatatttttatttaaggttttttttttatgattttttaattttttgttcggaagtttacgaggacgttttcgggttacgcggcgcggatattaggagttatgtgatgttaagatggcggcgtcgcggtagtaggattcgggttgtggcgttttaggagtcgcgacggtttttgttttcgggtagtgaggggtagtagcgtttggttgatttttgcggcgtttcgtagtttcgcgttaagttttgtttagagcgggggtttttgttgtcgtagtgggtttcggagagtgtaggtgatttcgtagtaggttttttgtgttggtcgcgttcgtcggacgaagaagagaagggtagttgggtttgcggttttggcgtttatgaggttttagagagtttcggaggagttataattgtgagggggttgttagagttttttttttcgggtgtgtgagaagtagtttaggatttcgggttcggggagtcgtaaagaaggtcgtaagggttttattttttttttcggaggtttgttttttgcgcgtcgattaatatcgtatttttttttatttttttttaatgttttttttatatatttggaaatatgattagcgtttttgacgtagtggtttttattaaagaggaagagtatgaagaagagttttataatgagtcggttttgtttgaggagtattcggtgtcgtttttttttttcgttagttagggtgttaatttttggttaaaattgttcggggttaagttttcgagggattttatttttattttcgagttttttgagtaggtgggattttaatttttattgattatttttaatgatattaaagtttttggtatttttgattttaattatttttttttgcgtattatgtttgtggattattaggtttttttcgtgggttatttttttggatttgtttattttaagttgaatttcgtggaggattttaaggtggtgttgggagattttaaggagggcgtttttgtatacgtgtattattttattttatacgatttggaggttcgtggtttcgtgaggtcgttttgtatggtttatatttttgtagattagtataaaattatgtagtagttttaggagtttttagtcgaattttttagagtttttgagtgtttgaagattggtaataggaaggtatttgttggggaatttgaaaaaaagttgaaagatttggattatattaggatagtgttatatatagaaacggagatttagaagaaagttaacgataaaggtttttatttattttaggtaattgagaaagttaatgaattggttagtgtggagaagtttattattgaatattaagatttgttgaagtagattcgtttatatttttatcggaagttgaaggggtatgatttgtgttttggtgagatggagtatatttaggattaggttagttaggtatttattatttttaattttgatgagtttgtcgatatagatttttatatttgtagattagtttatattttaaaatttattaaagtaaagtttattaagtgttttgataagaagttgaagattttggaggagttttgtgatattgaatattttatttagattttggtttagtttagttatattgaatatatgtttagaggagatttgtgttattttttgattagttagattgatagagtatttttaaaataatagtatataataaattttttttttgaagattttgtggaggtcgatgataggatggtggagaaataagaaagtatattttttaagtttagttaagataggtcgttttttagttttttagaagaatgtttaatttttaaagtgttaattagtgttggtttttataagtttagtgtggagtttgtgttgattaagatggagtaggaattgggagatgaggagtataaggaagtggaagtgattgagttgagtagtttcgatttttaggaaaatttggattatttggatatggatatgaaagggagtattagtagtggtgaaagtattgaagttttgggtacggagaaatttattttcgtgttttttaaatttgatagttaggtaagttttatagtattattgagtttttaggtggttcggagtaaagtagttagttataggattattagcgaggatagtattgaagtttttagtatttgtttttttgaggtttttatttttgatgattttaaggttagttatttaagtgttattaatgaagaagaattatatttagatggtaatgaaggagttattcgtttttaggtaagtattagttttttagaattgggtgagatagaggaaggtagtatagaaaatattttattataaatagattttttttgttgtattgggaaggagagcgatggttagttggtgttgttttttattttagtttatatatattttgacgaggatggggtggtgagtagttttttatagcgttataggtagaaggattaggggtttcgtgtagattttttagtggaaaatgttaattttttttttcgagataatagttgtgaagggtttttcgtttatgagttggattcgagttatttgttggttagtcgggatattagtaagattagtttggataattatttagatattattagttacgtgagtagtgtagcgtttattagtttagataggattttttttgtttattttgttggtttgtttttcgataggtataaaaagagggttggttagaacgttttaaaatttattcgttagtatttttttgtttatttagttatttattttttgtttagtgggaggatatttgtggttttgggggaagatgaggttatagttaggaaattcgtgattgtattggttatttttgtttttagttatggttgttacgttaagttcgtgaaatattgggtttttttttttttgtatattatggatttttagaagtggaagtttattggtttgtagaggtaattggttttaggtggtggggaagggttttggttagatagggatgaggtatattggtgtggtggagttagaattaggaagtttggtttttagatagggtttagtttttattattgtgttatttttggtaagttatttttttttttggtttttatttttttgtttgttatgtgagggggttgtagtttttaggtggttgttaatttttatttgttttcgagttgtgttagtattattagggaaagtttttatttttatttttatttttttgtaacgaagtttcgtttttgtattttaggttggagtgtaatggcgcgattttggtttattgtaattttcgtttttcgggtttaagtaatttttttgttttattgttttgagtagttgggattataggcgtttgttattatattcggttaatttttttatttttagtagagatagggttttattatgttggttaggttggtttggaatttttgattttaggtggtttgtttattttagttttttaaagtgttgggattataggtgtgagttatcgtgtttggtcggaaagtttttaaaattatggatttttgagttataagttttcgaggttttgattcggttggtgtgaggtaagatatggaatttatttgtcgttattgttagttcgattgtagggagtatttttttataaaagtaaaaggtttattagaagggatagatgatttcgggggaaagggttaggttgttgtttttgtaagtgtttttttaatttttagagtacgtgtagatgttgggtgttgggagtatttgtttttagtattttatataggtatgaggtgtagcgggtaggtgtggggagttttgtattttggagggttttttgcggggttaaacgggaatgggatgggttatagtttatttaaagaatttttgggggaggtgagtagtagacgttatttgagggtatgataagatgaaattgttgtgggttgtggtagttagcgggagtagtgggtggtttgggttaagttttggtgtgttattattcgttgtttggattcggattaattattttatttagttatttaattatgttgaatatttttgaagggttttcggggtttatttgagagttatcggaagggtttacgtttagtgtatgtttaaaaaaatatagtatagtgtagtgtttggttttgagaagtatttagagggtggaatcggtatcgatataggtaggtagattggggtttatttgaggtttagttttaaaaattacgagtaggagagatgttttcggtggttgtgatttttttattttcggaggtgttgcgttgtagaggttttgtattttgagtattacggtttagaagtgtgtttttttatttaggtttattgtttatatgatggatttttttttaggatttttattttcgaatattagttttgttggtttttgattttttttattttgtttggaaatgtttgtagttgggttagttatttgtggggataagagatggttaaataattaagttggtattttgttatttgcgggtttttttgttttgtgtgttttttgttgttgttgttgttggagatagagttttgttttgttgtttaggttggagtgtagtgatgtgattttagtttattgtagtttttgttttttaggtttaggttattttcgtgttttagtttttttagtagttgggattataggcgtgcgttattatgttaggttaatttttgtatttttagtagagatagggttttattatgttggttaggttggttttaaatgatcggtttat

SEQ ID NO: 57 - DNA, 6326 bp, Artificial Sequence
  chemically treated genomic DNA (Homo sapiens)
ggggttagagtaagtagattaagggggaaaagtggtttaggtcgaagtttgttggcgtatagggaggaaaggtgggtgcgtagtagagttttgggagatgtagttggagttgttatgggttagagagtttatttgtagatagtgtcgttattttataaggtttcggtttttttattgtgggatggttgtatatttaaggggaatatttatttatttattttgaggaaaaaagtaaattgttattttatttgggatagttttttggttaagattattgattttattgtagttttgtgattttttaagtggggaataaggttgatagtttaaggtcgattttggatttttttttttgtatagtatgatgagtagtagaagtttttttagtgagggagtttttttggtattttttttgaataatgttttttataatttttttttatttttttggttttattgtaaagttttttgttttagtttttgttttttagttatttgtgtttaggcgttaaatgtaaaaggtgtaaaagggaatgtggtgaggaggtatttttagttttgatttttaggttttaatatttattttaggtgattgtttggattgtttgttttgcgttttatttagatatatcgtttttttataattaagtgtatacgtgtgtatatatatgtgtgattatagatggtagtgttttttatatatcgttatatgtttagtttttttagtatgatttattttagtgatttgatttacgttagtatgtattaagtagatgtttttttttgtaatgttgttaggtgttttattgtagagaatgttatgttttttttttttttttttttttttggagatggagttttattttgtcgtttaggttggagtgtagtggcgtaatttcggtttattgtaagtttcgtttttcgggtttatattatttttcgtttttcgggtttatattatttttttgttttagtttttcgagtagttgggattataggcgtttgttattatgtttagttaatttttagtatttttagtagagacggggttttattacgttagttaggatggttttgattttttgatttcgtgatttgtttattttggttttttaaagtgttgggattataggcgtgagttatcgcgttcggttagagaatgttatgtttttatttaattatttttttgttgatagatattagtttgtttttaattttttattatgattgataatgttgtagagaattttttagtgatgtggtttattataggtattatcgtgtttagtttgaggttattttagcgttgttttgttttattttttggggatttagagtttatatggatagttttgttagggtttattattgatttttgtgagtttttttaggtgattttattttttatttgttttatagtttttgttttttttgggttagtatgttattatttaggtttttttgtaatttttgtttgagttttttattttttgggagttgtttttttgatttttattttttgtttttgtgttttattttttggattttatagagtatattttttgtggattttttttaatttttatttttttttttatttaatttagagttaggttttgtttttgtaattttttttttcgaattttgatttatttttttttttttttatttatttggatttttttatttaattaaatttagtgttttttttgttgtgggtttgttcgtagtattattatttgtttttttttagtggatagtcgtattatgtttttttttttattaagagaagtgtagttttgtggtagttttgtatcgtttggatgttgatcggttgttttttttgttttttatttttttaaggttattattgtagtagttttttttttttcggtacgtagttttttttttttttttcgttagagtagttttattagcggagaatatgttggtatagttattattttgaaataagaggggatagtgtattagtttttttttattttttaggttttgttgagtttattttatgtagtttttatttgttatttattatatggttttattaggattatttagggttttgtttgttagattttatagttaggttttagttgttatttcgtttggtttgttagtgttttttatatggtgataattgttttgaagtgtttttttttgtggtttttaggattttattttttttgatttattttgttagttttttatttttcgatttttagtttgggttttttttatattgttgttattttttttaggttatttaggttgtttaatgggtaggtttcgtttaatatatttgaagttttatattagattgttagtttttttttgttatgtttaagttaaagttatgggttgttttttttgtttttttgtaaagatgaggttttattgtgttaattaggttttttttaaatttttggttttaagtggtttttttgttttcgttttttaaagtattaggattataggtgtgagtttatggtaggtgtgagtttatgtttagttttgttttaggttatttttgatttattttttttttttttttttatgtttcgttattttaggtttgtttggattttgatttttttcgtattttttattattgttatttagggtttatttatttttttttatgtggtagttagagaggtttttttaatatttgaagttagattattttatatttatgtaaattttttgttgttttttagtatttttagagtagatttatattttatatttttgtttttttttttagttttatgagtttttttgtttagttatattttttttaaggattttattttttttgttttttttgtttggattttttttttaggtgttatttagttttgttttgttttttttttgtttttatattatagtatgagttttgggagggtaggatttggtgttgttttgtgttgtattttttgtattttggattaggttaagtatgtagtaggtatttaataaataattggattattaagtttattttaaggagtggaattgttgggatgtgtattcggattttgagagggatttttgaattgttgtatatagaggttgtttttatttaatttttttatgtttttatttgttgtgtgtgtaacgattttgagtttttttttatgtgataagtataagtttattgtagttttgagttttttttgcgagtgttgttggatatgatgtgatattataaaggtatttacgtggtggtttttttttttttttttttttttttttttgtttgagatggagtttcgttttgttgtataagttggagtgtaatagtatgatttcggtttattgtaatttttattttttgagttcgagcgatttttatgttttagttttttaagtagttgggattataggtatttattattatatttagttaatttttgtatttttattagagatggggttttgttatgttggttaggttggttttgaatttttgattttaagtggtttatttattttagttttttaaagtgttgggatataggcgtgagttattgtgtttatttaggtggtagtttttttttatgttgagattattttattttgtttttattttttttgagatagggttttgttgttatttaggttggagtgaagtggttgttttatttataggtgtagttatggtatataatagttttgaatttttggttttaagtaagcgatttttttgttttagttttttgagtggttgatattataggtatgtgttattatatttggtttgtgagatttattttaaaagtatatgttttttttaatattttttggttttattgtttttatttaaatttttgttagatttggaatcggttttagtgggatttaggaagtaggagtttaattttatttttttttatagtagattttttagttgttttaatacgagtttttttttttttttttaatacggtgttatgtttataaatattagtgttatatttataatgattgaaaaaataaaaagggtttatgtggtttttttttatttggttagtaggtattgaatgttatgtgttaggtatagaaagttgttgtaaagattaatagtgatttagatataaagtttatcgtgttttattttgggggtgaagtagtcgttgatgatggtatgatgtgagtgggttggaatggagatttagtttaagagttgtgggtataggagggttgatttattttgttagtggtgttgggagatttgagttgggtttgtgggttatttagttgtattttttaggtttggcggagtttttttttaggtagggaagcgtaggtatagaggttttaagtgcgtgtttgtttcgatgatgatatttgatttaatttggttagagtatgatttgtaaagtaaaaggtggagtggaataggtgggagatagatgtgatagagttttgatgtttgtttggggttggatcgattagttagagggttttaggtttattatggattagaaggatttggggggtttagtttgggtatttgtattttgtaaagtgttttggggcgtttaagtgttttgttgagcgggaggtgttgttttcggttacgatagtttttttttttaggtgagtttatttgtaggtggaagagttagtttagagaggagggttaggtatttatttggtttgatttattattttagatttttaggttttagtatttttttagtatggatttaggaataaaattgatttgagattattggggttattttatttttttttaaatggagttatatttttaggattattttagttattttagttgatttggtagtttttttttgtttttaattttagatgtttttaagtttttttaattttttaattttttttttttttgttttaggttggttttgttttttttttgttaaagtgattttttttgtagtggtgtaggttttattgatagtattgttattttgagtgtttttttttttttttaggagttagtattggtaatagtgttgtgttgcggaagagtggagtttaaatttttttattgttagtgtttcgaaattggagtgtgaaggatcgagataaaatgaagattgtgtttatggttgttgaaaagtcgtttttggtatagttaattgttaaaattttttttagaggtaggagagattagttttgttttggtttgtaagtacggtcgtttatgtgttataggatatttttttttaatgtgattttattttggttggggtagatttggttcgggtcggtaggtggtaatgaagtattttagtatgttatagtggggtgtatttgtttttatttttggtaatgtgttaaagttggggtttttataaggtataaggtataatttataatgaaattgaaggatagttattatttatatgttgggtttggtggggttattaggtataggtagtagaaattagttttggaaggaaggagacgtagttaggattatattttagttaaggtttgatgaggttatgttttaggtattgttatttttggatatttttattgttttgtggattttacgttattttagagtagttaatggattgagttatggttataggtattattgagatattagggagttcgagagggaatgtttgttatttatttttaattttggttattggggtggttggtagggtgttgtttttttttatttttgaattttttttaaataggaagagttttagatgttgggtatttagaaatgataggtatttatttggtttttttttggtttagtagttgagaggggaagagattttcgtttagttgagaaggtatggttcgtaggggacggtgttttaaaagtggtgttcggtgtttagaagttgagaaagtatagttgagtatggttagtggagagggtgagaattcgataattagaaggtttttggtaatcgagagtagatttggagtttgttttagtaaacgatgaataacgttttaatgaagtgaggtaaaaatggaattgaagagtgaaaatataaatatagagaaagagtttatttttgtttgtttttggttttcggtagtttggggttttgtatcgagagtgttttgtgttaggttgttggtagatgttgttttttttgagcgtcgttttattttttagtgtttaattattcgtattagtttgcggaatgtcgttatttattattttggggaaggaggattttggttttttgggaggtggtattcgggttggggtttttatagggtttttagtttagttgaagtagttagttattttgtgtttttttatttttagg

SEQ ID NO: 58 - DNA, 6326 bp, Artificial Sequence
  chemically treated genomic DNA (Homo sapiens)
tttggggatgaggaagtataaagtgattggttgttttagttgagttgaagattttgtggagattttagttcggatgttattttttagagggttagagttttttttttttagagtggtgagtgacgatatttcgtagattggtgcgggtagttgggtattgagaggtgggacggcgtttagggaaaatagtatttgttaataatttagtatagagtattttcgatgtagagttttaggttgtcgggagttaggagtaggtaggggtgggttttttttttgtatttatgtttttattttttaattttatttttgttttattttattgaaacgttatttatcgtttattaaaatagattttagatttattttcggttattagggattttttaattatcgaatttttattttttttattgattatatttagttgtatttttttagtttttgggtatcgggtattatttttggggtatcgttttttgcggattatgtttttttagttgaacgagggttttttttttttttaattgttggattaaggggaggttaggtaggtgtttgttatttttgggtatttagtatttaaaattttttttatttggagggaatttaaagatagggggaaatagtattttattaattattttagtggttagagttgggggtgagtggtagatattttttttcgagttttttggtgttttagtagtgtttgtggttatagtttagtttattggttattttggagtgacgtgaggtttataggatagtgggagtatttaggggtgataatgtttggggtatagttttattagattttgattggggtgtagttttggttgcgtttttttttttttagggttggtttttattatttgtatttaatagttttattaggtttagtatatggataatgattgttttttaattttattgtaaattgtgttttgtgttttatgggaattttagttttggtatattgttaggagtggaagtaaatgtattttattgtgatatattgagatgttttattattatttgtcgattcgaattaaatttattttagttagggtggaattatattaggaaaaaatgttttgtaatatataaacgatcgtgtttatagattaaagtagggttggttttttttatttttagagaggattttggtaattgattgtgttaaggacggttttttagtaattatgagtatagtttttattttgtttcggttttttatattttagtttcggggtattggtaatgaaaaagtttagattttattttttcgtagtatagtattattattaatgttgatttttaaagagaagaaaagatatttaggatagtaatgttgttaatagaatttatattattataaggaaaattattttaataaagaaaaaataagattaatttgaggtaagaagaagaaaaattagggaattagggaaatttgaagatatttgagattaaaaataagaaaaaattattaggttagttgaagtggttgagatgattttgggaatgtggttttatttgggggaaggtgaagtggttttagtgattttaggttaattttatttttaaatttatgttaggaagatgttggggtttggggatttggagtgatgggttaggttaggtggatgtttggtttttttttttggattggtttttttatttataggtggatttatttggaaagaggaattatcgtggtcgagagtagtatttttcgtttagtaaagtatttggacgttttaggatattttataaaatgtagatgtttaggttgggttttttaggtttttttgatttatgatgggtttgagattttttggttagtcggtttagttttaagtagatattaggattttgttatatttattttttatttattttattttattttttgttttgtaggttatgttttggttaaattaaattaaatattattatcgaagtaaatacgtatttgaagtttttgtgtttgcgtttttttgtttgagagaaagtttcgttaggtttggaggatgtagttggatggtttataggtttagtttaagttttttaatattattggtagggtaagttagtttttttgtgtttatagtttttgggttaggtttttattttaatttatttatattatgttattattagcgattattttatttttaaaataggatacgatgggttttgtgtttgaattattgttggtttttgtaatagttttttgtgtttgatatatgatatttaatatttgttagttaagtaaaagaaaattatatgaattttttttgtttttttagttattataaatgtagtattgatgtttataaatatagtatcgtattaaaaaagaaaaaaaagattcgtattgagataattgggaaatttgttgtgaaaaaaaataaagttagatttttgttttttaaattttattaaaatcgattttagatttagtaaaggtttgagtagaaataatgaaattagaaaatattaggaaaaatatgtgtttttaaaataaattttataagttaggtgtggtagtatatgtttatagtgttagttatttaggaggttgaggtaagaggatcgtttgtttgaggttaggaatttaaggttgttgtgtgttatgattgtatttgtggatagaatagttattttattttagtttaggtgatagtaagattttgttttaaaaaaagtaaaagtaaaataaaataattttagtataaagaaaaattattatttagatgggtatagtggtttacgtttgtattttagtattttgggaggttgaggtgggtggattatttgaggttaggagtttaagattagtttggttaatatggtaaaattttatttttaataaaaatataaaaattagttgggtgtggtggtgggtgtttataattttagttgtttgggaggttgaggtatgagaatcgttcgaatttaggaagtggaggttgtagtgagtcgagattatgttattgtattttagtttgtataatagagcgagattttattttaaataaaaaaaaaaaaaaaaaaaaaagggaaaattattacgtaagtatttttgtggtattatattatgtttaataatattcgtagaagaaatttagaattataatgagtttgtgtttattatatagggagagatttaaagtcgttgtatatatagtagatgagggtatggggaagttaaatgggaataatttttatgtgtagtaatttagggattttttttaaagttcgagtgtatattttagtaattttattttttggaatgaatttaatagtttagttatttattgagtatttattgtatgtttggtttagtttaggatgtagggaatatagtataaagtaatattaggttttgtttttttagaatttatgttgtagtatgggagtaggggagggatagggtagggttgggtgatatttgggagaagagtttaggtagaaggagtagggaaggtgaggtttttggggaggatatggttgggtaggggggtttatggggttgagggagggagtaggggtgtagaatgtgggtttgttttaggggtgttgggaggtagtagagggtttgtataggtgtgggataatttgattttaagtgttaaagggatttttttggttgttatatagaagaggatgaatgggttttgggtagtagtggtggaggatgcgagggaagttagaatttaggtagatttgggatggcgggatatgggagggggaggggaaggtgagttaagaatgatttgaggtagagttgggtatgggtttatatttgttatgggtttatatttataattttagtgttttgggaggcgaaggtaagaggattatttgaggttaggagtttgagaagagtttgattaatataatgagattttatttttataaaaaagtaaaaggaataatttatggttttggtttaggtatgataggaagggattggtagtttgatgtgggattttaggtgtgttaaacgggatttgtttattggatagtttgggtggtttggaggaggtggtagtaatgtggaaggagtttaggttgggggtcgggagatgaggagttagtagggtgagttaggaggggtaaggttttgaaagttataggaaagagtattttagggtagttattattatgtgggggatattgataggttaggcgagatggtagttgagatttgattgtagggtttggtaaatagagttttgggtaattttgatggggttatgtggtgagtgatagatgaaagttgtatggggtgagtttaataaaatttgggagatgggagaaggttggtgtattgtttttttttgttttaggatggtggttgtgttagtatgtttttcgttgatgggattgttttggcgagaaggaaaagagaagttgcgtgtcggaggggaaggaattgttgtagtgatggttttgggagggtgaggggtaagagaggtagtcggttagtatttaggcgatgtagagttgttataaggttgtattttttttggtggaggaggaggtatggtacggttgtttattgagggaggataggtggtgatgttgcgggtaggtttatagtagaggaagtattggatttagttagatgggagagtttaggtgagtaggagggagagggagtgggttagggttcgaggggagagattataaggatagaatttgattttgagttgggtgaagagggaggtgagggttggggagggtttatagagggtgtgttttgtggggtttaggaagtgaggtataagagtaggaagtgggagttaaagaagtaatttttagagggtgggaggtttaaataggaattatagaggggtttgggtggtggtatgttgatttagggagggtaagggttgtgagataggtagagagtgaagttatttggggagatttataggagttagtggtgggttttgataagattgtttatgtggattttgagtttttaggaggtaggatagggtagcgttggagtggttttaggttgggtacggtggtgtttgtgatgaattatattattggggagttttttgtagtattattaattatgataaaaggttagaaataagttggtgtttgttaatagggaggtggttaaataaaagtatggtattttttggtcgggcgcggtggtttacgtttgtaattttagtattttgggaggttaaggtgggtagattacgaggttaggagattaagattattttgattaacgtggtgaaatttcgtttttattaaaaatattaaaaattagttgggtatggtggtaggcgtttgtagttttagttattcgggaggttgaggtaggagaatggtgtgaattcgggaagcggagaatggtgtgaattcgggaagcggagtttgtagtgagtcgagattgcgttattgtattttagtttgggcgatagagtgagattttatttttaaaaaaaaaaaaaaaaaaaaaaagtatggtattttttatagtagagtatttggtagtattataaaggaaagtatttgtttggtatatattaacgtggattagattattgaaataaattatgttaagaaagttgggtatgtaacggtgtgtagagagtattgttatttgtgattatatatatgtgtgtatacgtgtgtatttgattatgaagaggcgatatgtttggatggaacgtaaaataaatagtttaagtaattatttggagtgggtgttagggtttggaggttagggttgggggtgtttttttattatatttttttttgtattttttatatttagcgtttggatataggtgattgagggataagaattaagataagggattttataataaaattagaaaaataaaggagggttgtaaagggtattgtttagaaaggatgttaaaggaatttttttattaaaggggtttttgttgtttattatgttgtgtaggggaagaggtttaaggtcggttttgggttgttaattttgttttttatttaagagattataggattatagtgaaattagtaattttgattagaaagttgttttaaataaaatgataatttgtttttttttttaaaataagtaagtggatgttttttttaaatgtataattattttatagtgaaagagtcgaggttttgtggaatgacgatattgtttgtagatgagttttttggtttatgatagttttagttgtattttttaaggttttgttgcgtatttattttttttttttgtgcgttagtaggtttcggtttaggttattttttttttttagtttatttgttttgatttt

SEQ ID NO: 59 - DNA, 6156 bp, Artificial Sequence
  chemically treated genomic DNA (Homo sapiens)
tagtttgagtttgtattatattatgtttggattattaggtgtaaatattattagtgttttagaattatatagtgaattagtatttttggttattaatttttatgtttattttttaatttttaatttttagttgttttaagagtttaatgtttttaaggtagggattttgttattttgaaggatattatgaatatttgtagttttatgtatgttataaatgataataaataaaatgtatattgtatagataagaatagtagtttattttataagatatatggtaatatatgttttaagattagagttttgaattggattatatttaattacggttaatgaatttttgggaattttaagtattaaaaagttatagtattattttatttttgaatgattaattatgaaaaaaatgaaataaaaggattggtagaaggtttaataattttagagtatatttaattgttagtatatatgtatttatttaatttgtagttttgagatggtaaaaattttgaagtatatatataaagtagaaaatttggttgtttaattaattttttatttaaataattaatggaaaattaaatttaataatgtttatatataatgagttaaagatatttatttttaagtttgatatggtattgtatgtatgtatatatatatatatatgtatatatgtatatatatatgtttgtgtgtatatatatagatatagatatatatttaaattttattagatttaaaaggtaaaaggaaattatttagatttaatggatataaatattttagaaaggaagattttaagagagtgtatatatttatagtaatagcgataggaataattaaatattagaatatttatagttttagtttgttaaaatttgataggttgattattattaataggtattatgatgggtagtaataataattagtagtatagtaatttaagtgtatattatttttttatagattaaaaattatttttttagtaagtttatatagttattttatagttaggattgtttaaaaatttttgttatttttagagttttaatatttattatgtgttattagttttagtattaatattattttttaatttttagttgttttatagtgatttagatggtttataattataatgaattaatgagatttttttacgttattagaggaaatgtgaaatataatttgtaaattaatattagtatatatgtcggggttattgattgtttgtttttaagtaatataaattaatgaaattaatttttttaatttatattattaagtttttttagtgattttacgtaaaggtattgggggataaaattttggaagaaaaaaatcgttgatataattttaaattatttttagtatataaaagaagagttatattttgatttgaatttatgtagttagtttttattaatgagagtgatatttgggggttgaaattagtgttttggtttttaaatatgattagatggatttattgtgtgggaggtgaataaagttaagataaaagataataattttatttagaagaaaatatagttgaatagatgtaattttagttaattaatataggatgggttggtatatatataatattatatttatttatttaaaaaattgtttaggtgttgaaaaattgttgtggtattttttggaaagtaatttttaatataggtaaatgggtgagttttgtgtaaagttagaaagagtattttggaaaatgtttgaattttttttttaaatatatttataattaatttttaaataatattttttttagattggaaatttgtattttaaattatttttagaaaaaaaaaatttttattttttttagaattaaaatatttgtaaaatataggattatattggaagtgttgatatggttttaagggtagtaattgtaaaagtgttattaaaatatattattataggtatatttttatattagttaattggtatattaatttttttgaaagagtgttaaagaagaagtataaagtataatattttgagtttatgatatattttggggaagaaattttttgtaatttttaaattagtatgaaaagttatattattaagatttttatagtaaagttattggatgaagttttttatttaatgtgatataaaagtaatttttgaaattttggaaagttaataaaaatatatggaatattaagtagaggtaaagaagggattgtaattaaatttagaataacgaattaaaatttttttatggttttgatatggtaattataaaatgtagggttattataaagtttgaaattatagaatattatagtatttttaagaaatattatgatattatatttttaaggtttaattaggtaataagatttgattttttgatggtatatttagttatttaacggataatatacgtttatttgtatttttataagtaaatatttatatatatcggaggttaatttttgtttttgtggtaattgttttataggtaagtttagtagtttttaatgaagtagaattgaaatatttttgggggaaagttatatttttatttaagtatatgtattttttttcgggattatgttatagtgtaatgtaaattttagttatggtatttagaatgttagaatgttatattttgtgttgatttgtatattttaatagtttggagtagttgaagtagttaaattatttagttttgggaaggttggaattttcgtaagaattatagtgatttatgtgtaatataatatgagaattagattttttgaagtattaattattagaggtattattaataataacgggttaaaaaagaggaaaaatttttttaaaggataatggattagtatttttagttaatttgtgattttaaattttgtttgatggagtttaattttattttagtcgaggtatttttgttttttattattggtttttttgttatttatttttttttttttatggttgttgtaaattttttttattttttttttatatttgataaaattttttttaaattttgtttaagttttgaatggaatagtaatagtattacggtaaggtggttttattttatttatttttaggaaaattttatatttattagagtttatattaaagtagaattttttattgtttattttgaaagaagttttttttgggagtttaagcgggttatcgtttttattttttcgtttttttatgtttttttcgttatagtttttaattagttgaattaaggtattacgaaatttaattattttttgtgttgggaggataatagtttgtttttggtttaaattgtggttaaaataatttattatgttagtttttcgtattatggtttgtttaattcgtaggaagcgatttcgttgatttttttttaggtttaggtaatattttttattgtttttttcgatatagtttgtttttaggatattgtgaggatgtttttcggattttatcgagattggtggggagggtgtcgagtgtttttgtttttttttggagttttgttttttgttgtggttatgtttttgtcggtggttttttaggtttaggtgggtatagtgttcgatgaagttttttagatagttttttagtttcgttgttatagatagggagagggttagtttattttttttgatgttgttttgtcggtttttttttatttagatttcggttatttttaggaagcggtttcgggagttttgttttacgtttaggtaaaatttttttttttggatgtttattcgtttggaggttagtttttggatttcggttgcgttttcggtttgattaggggtggttgaggtcgcgtagtgggggtagtgggagtgttgggtttggggatagagtttatttttgtttaggttagagttttttatatttttgttttcgcggtcgcggtcgtcgtcgtttttttttcgtttggttttttttatttttagttgtaagtaataaatagatatacgggatggggtgggggaggggtgttgagaataatcgtagacgtttttcggtttgatcgtttcgtcgtcgttcgcgatttttacgtcgggttcggttttttcggcgtcgtagcgcggggttttagttattgtcggtcggttggcggtcgtcgtttcggttttgttcgcgtttttcgtattttttcgtcgttttcggggtcgttttcgtacgtcgtcgtcgttcgtttcgcgtttcgcggttttaggtttttagtcggcgggtatttatattatttttgttattatcgtcgtcgtcgatgttttttacgattatcgtcgtcgttatcgttagttttcggtttttttgttgtagtcgtcgtagtcgtcgtttttcgttttttttttcgtcgtcgtcgttcgtattgtttttcgtcggagtagtcgggtaggggtatcgttcgcggcgtttatcgtagtcgttttttttgcggtcgttgcgggggtcgtcgtttgatttcggatatcggtttcgtattcgttaggaggggagggaaggggaggcggggagagcgacggcggggggcgggcggtggatttcgtttttttcggtatagtttgttgaggggaagagggggttttcgtttttttttagtgtattttttgattgaagttcggcgcgtggggtgtagcgggagtgcgaggggattggataggtgggaagatgggaatgaggatcgggcggcgggaatgtttttattttttcggattttatcgggatgtaggattttagttgtttagtcgtatttgcgaagagattatatttttcgaggtgtttagcggtagcgagggtttttacgtatgcgtatcgcggcgcgttgggcggggttggatgggttgtggtgggagggttgtagcgtcgcgagaaaggcgagtcgggtcgggggcggggaaaggggtggggtaggaacgggggcggggacggcgttggaggggcgggtcgggtaggtttttcggagttgatgtgtattgtgtgcgtcggggaggcgtcggtttgtattcggtagcgcgggaataaagtttgttgatttggtgtttagtttggatgtttgggttgtaggttttgtttgtggtggcgttttatagttattcggttgaagaagatttgttggattggattttttcggggtaaagtgtttttttattttcgtttttttagtttcgtgtttcggggtatttatagtgttaggtttttgagatacgtggaggcgtttaggttcgcggagtaggtttttgggttgtgtttgggagattttggaaaaatagatttttttttttttttttttttttttggagtagttgggaaaggcgtttttcggagttttcgttatttagaaagtgttttttcgttttgacggttttagtttgatgtttattttgcgcgtttagttaggattgttttttttagtacggtttttattatggtagaaattgagttattataggtttgtatagtaaagtcgagggaaataatttgttgtttatgatttagtaagtgatgatggatatttttgagtttaaattatttagtttttaatggattttttttttttttttttttagttgaattttagttgtttttaggttaggtttgatatgaaaaatattattttttattgaagagggtaatataatttttaggatgttaatataggagtttgtaagtcggagtattttaggttttttatggttcggtatatttttttttaggggtgggatattgggataagtaggatagtttagattttgatgttattgaatagtggtgtttatttaaaaggaagaggttggggtataaaattataatttaaagtgtttattttagttaaaatgaggatagttgtttaggatttattttttagttgttttggggagtgtttttttagttttggttataagtaggtttttaaaggcgaaggggaagagtgggttgagataaagttggttaggaattgttattggtttatagagatattattgtttagtgattggttgtatattgtaatttatagggtatgagttatcgtgtttagtatatggtattttatggttttttggttttagtttagagtttatatagtaggtgggttttaagagataattatttagtttagatcgggagtgagat

SEQ ID NO: 60 - DNA, 6156 bp, Artificial Sequence
  chemically treated genomic DNA (Homo sapiens)
gttttattttcggtttgagttggataattattttttaaagtttatttgttatatgggttttagattggaattaagaagttataaaatgttatatgttggatacgataatttatattttatgagttatagtgtatagttaattattaagtaatggtatttttgtaaattaataataatttttgattaattttgttttagtttatttttttttttcgtttttaaaaatttgtttgtaattaaggttgaaggagtattttttaaggtaattgggaaatgagttttgggtagttgtttttattttggttgaagtaaatattttaaattataattttgtgttttagttttttttttttaggtagatattattatttaatgatattaagatttgaattgttttatttattttaatattttatttttaaaaagaaatgtatcgaattataaaaagtttgaagtatttcgatttatagatttttgtattagtattttaagaattatattattttttttaatagggagtagtattttttatattaaatttagtttgagaataattgagatttaattaggaaaaaaagaaaagaaaatttattaaagattgagtgatttgaatttaaaaatatttattattatttgttaaattatagatagtaggttatttttttcgattttgttgtgtagatttgtagtggtttaatttttgttataataaaggtcgtattagaaagagtaattttaattaagcgcgtaaggtaaatattaagttggggtcgttagggcggggaaatattttttgaatggcggaagtttcgagagacgttttttttagttgttttagaggggaaaggaaaagggagaaagtttgtttttttagaattttttaaatatagtttaggggtttgtttcgcgggtttaagcgtttttacgtgttttagaagtttagtattatagatatttcggggtacggagttgggaaaacgggaataggaagatattttatttcgagaagatttagtttaataggttttttttagtcggatgattgtggagcgttattataagtagggtttgtaatttaggtatttaggttagatattaaattagtaaattttattttcgcgttgtcgagtataagtcggcgttttttcggcgtatatagtatatattagtttcgggagatttattcgattcgtttttttagcgtcgttttcgttttcgtttttgttttattttttttttcgttttcggttcggttcgtttttttcgcggcgttgtaatttttttattatagtttatttagtttcgtttagcgcgtcgcggtgcgtatgcgtggaggttttcgttgtcgttgagtatttcgggaagtgtagttttttcgtaggtgcggttgggtagttagagttttgtatttcggtggaattcggagaagtgagaatattttcgtcgttcggtttttatttttatttttttatttgtttagttttttcgtattttcgttgtattttacgcgtcgggttttagttagagagtgtattgaggaagagcggagatttttttttttttttagtaggttgtgtcgggggaggcggggtttatcgttcgtttttcgtcgtcgtttttttcgtttttttttttttttttttttggcgggtgcggggtcggtgttcgaagttaggcggcggttttcgtagcggtcgtaggaggggcggttgcggtgggcgtcgcgggcgatgtttttgttcggttgtttcggcggggggtagtgcgagcggcggcggcgggggaggaggcggggggcggcggttgcggcggttgtagtagaggggtcgagagttggcggtggcggcggcggtggtcgtgaagggtatcggcggcggcggtgatggtagagatgatgtgagtgttcgtcggttggagatttggggtcgcggagcgcgggacgggcggcggcggcgtgcgggagcggtttcgggggcggcggagggatgcggggagcgcgggtagagtcggagcggcggtcgttaatcggtcggtagtggttggagtttcgcgttgcggcgtcgggggagtcgggttcggcgtgggggtcgcgggcggcggcggggcggttaggtcgaggggcgtttgcgattgtttttaatattttttttttattttatttcgtgtgtttgtttgttatttgtagttgaagatggaaagagttaggcgaaggggaggcggcggcggtcgcggtcgcggaggtaagaatgtagggggttttggtttaagtaagagtagattttatttttaggtttagtatttttattatttttattacgcggttttagttatttttaattaggtcgggggcgtagtcgaaatttaggagttggtttttaaacgagtggatatttagaaaaagaggttttatttagacgtgaagtaaagttttcggggtcgttttttaaagatagtcgaagtttggatagggagaggtcggtaggataatattagaaagagtaaattgattttttttttgtttgtggtagcggagttgaaggattgtttaggggattttatcgagtattatgtttatttgggtttgaaaggttatcggtaagagtatggttatagtaaagagtaaggttttagaaggaggtagaagtattcggtattttttttattagtttcggtggggttcgaagagtatttttatagtgttttgaaaatagattatatcgagagggataataggaaatattatttagatttaaaggaaaattagcggggtcgttttttacggattagataaattatgatgcgggggattggtatgataggttattttggttatagtttgggttaagaatagattattgtttttttagtataaggaatgattgagtttcgtgatgttttggtttagttgattgaagattatggcgaaggagatatagaagaacgaagaggtggagacgatgattcgtttgaatttttagaggggattttttttagagtggataataaaaggttttattttgatgtgggttttaataaatatggaatttttttgaaggtaagtgaggtgagattattttatcgtaatattattattgttttatttaaagtttggataaggtttggggagaattttattaagtatgaagaagagatgaggaaaatttgtaatagttataaagaaaagagaatggatggtagaaaggttagtggtgaagaataagaatgtttcgattagagtgaaattgaattttattaggtaaaatttaaaattataaattggttaaaagtattgatttattattttttgaagaagtttttttttttttttggttcgttgttattagtaatatttttagtagttgatattttaggaagtttgatttttatgttatgttatatatagattattataatttttacgggaattttaatttttttagagttaaatagtttagttgttttaattgttttagattattgaagtatgtaaattagtataaaatgtgatattttgatattttaaatattataattaagatttatattgtattatgatataatttcgaaaaaagatatatatatttaaatagaagtgtgatttttttttaaaagtattttaattttattttattaaaagttgttaagtttatttgtagggtagttattatagaaatagaaattgattttcggtatatataaatatttatttataaaagtataagtagacgtatattgttcgttgaataattgaatatattattaaaggattaaattttattatttaattaaattttaaaaatataatgttataatattttttaagaatattatagtattttataattttaaattttgtggtaattttatattttatagttgttatattaaagttatgggagagttttaattcgttattttaagtttagttataattttttttttatttttatttaatgttttatatatttttattgattttttaaagttttaggaattatttttatgttatattgagtgggaggttttatttaatggttttgttatggaaattttggtggtgtagttttttatgttaatttaaagattgtaagaggttttttttttaaaatatattatggatttaaggtgttatattttatgttttttttttaatatttttttagaagggttggtgtattaattaattgatataaaaatatatttgtaataatatattttagtagtatttttgtaattgttatttttaaaattatgttaatatttttaatataattttgtattttataggtgttttaattttggagggggtggggattttttttttttaaaaataatttagaatataaatttttagtttgagaaaaatattatttgaagattggttataaatatatttgaaaggaaaatttaggtattttttaaggtgttttttttgattttatataagatttatttatttatttgtattaaaaattattttttaggaagtgttatagtaattttttaatatttaagtaattttttaaataagtggatatagtgttatatgtgtattaatttattttgtattaattgattgaaattatatttatttagttatatttttttttgaatgaaattattgttttttattttggttttatttattttttatataataagtttatttaattatatttaagagttagaatattgattttaatttttaaatattatttttattgatgagagttggttgtatggatttaaattagaatgtagttttttttttatatgttaaaagtaatttaaaattatattagcgattttttttttttagagttttgttttttaatatttttacgtgaggttattaagaaaatttgatggtatgaattaaaaaaattaattttattggtttatgttatttaagaataagtaattagtaatttcgatatatatattagtgttggtttgtagattgtattttatattttttttagtagcgtgaaggaattttattagtttattataattgtggattatttggattattatggaataattgaaggttaggagataatgttagtattagagttaatagtatatggtgggtgttgagattttaaaagtagtaaggatttttaaatagttttaattgtaaaataattatgtaggtttgttaaaaaagtagtttttggtttatgaaggaatgatgtgtatttgaattattgtattattgattgttattgttgtttattatagtgtttattaataataattaatttgttagattttggtaaattggagttgtgaatattttagtatttgattgtttttatcgttattgttatgagtgtatatatttttttaaagtttttttttttaaaatatttatatttattaggtttaaatgatttttttttattttttgggtttgataagatttgggtatgtgtttatatttatatatatatatatagatatatgtatatatatgtatatatatatatgtgtgtatatatatatataatattatgttagatttaaagataaatatttttaatttattgtatataaatattattaaatttagttttttattaattatttaagtaaagaattagttaagtagttagattttttattttgtatgtatattttaaagtttttattattttaaagttgtagattaaatagatgtatatatattggtaattgagtatattttaaaattattaagttttttgttagtttttttgttttattttttttatagttaattatttaaaaatgagatgatgttatgattttttgatatttaaaatttttaagaatttattagtcgtaattaaatatgatttagtttaaaattttggttttaggatatgtattgttatgtattttataaaataagttattatttttatttgtgtaatatgtattttatttattgttatttgtaatatatatggagttgtaagtgtttatggtattttttaaaataatagaatttttgttttgaagatattaaatttttaaggtaattggaagttagaagttaaaaaatgagtatgaaagttagtaattaaaagtattagtttattgtataattttaaaatattgatgatgtttgtatttaataatttaagtataatgtggtataggtttaaattg

SEQ ID NO: 61 - DNA, 6801 bp, Artificial Sequence
  chemically treated genomic DNA (Homo sapiens)
atatattatattttgtttatttatttattagttgatgggtagttgggtagtttttagtttttggttattgtgaatagtgttacgtgaacgtttgtgtgtaagtttttttttatatatttgtttttagttttgtgggaatatatttatgagtggaattattgatttatatggtaattttatgtttcgtgttttgagggataaattgtttttcgtggtagttgtattagtttatatttttattaataatgtatgagggttttaattttttttatatttttgttaatattttttttttttttttttttttgttttttttttaaattttagttattattattaaagattataaaggttattttgattaagtttttttgggaggtttgagggttattttttagttttttaagttttttttagacgttgggggttgattgggaaatgaagtgtaaatgggtaggtagattttgtttttattggtattagggtttaaggtggtataattagttatggtttttgaaatgcgggagaagaaaagagtagggtttttattggggttttgagtgattttttttatttttttagagtttatagttttaagggtagttttatttatgttagttaggaggtatgatattatatagtttcgtttttgtttgtttgaggaaattgttttataattttaattggggttagttttggggatagttagggtttttataaggttatgggtagtattttgttggtggagggtgtttgtatgggtttgggtggttgtttggatatattttttgttattcgggatgagggaggagtagaggatgatataaacgttatgttaggtaaggttataagatttagtgatatatagaaattttttgtgggaggagttggggtcggtggaaaaggagttaagtttttttttaagttgggagaggttggttagggagaagggaatatgaatttggattatgttttcggttttaatattttttttaagggaaggattttgtaagatttttggtagtgggagtgatttttggtagaagggggttgggtgtaagatcgggtgtgtagtggagaaggaaggttgggatggaggattaggataagggggtgggggagcggagtcgaaggagaaggaggaggggatggtggtgggagggggattgagagagggggtttgttggtagggttgaaattataggaggaaggtttgtttggaggtgtgaagtggtattttattgtgttttaatttgtatttttttaatgattaatgatgaatatatttttatgtgtttgttggttattagtatatttttttcggaaaaatgttaatttaagttttttgtttatttttaaattgggttgtttttttgttgttgagttgaaagtgtttgttataaattttggatattagatttttattggatatttgatttgtaaatatttttttttattttgtggggtttttattttaattttttttatagtgttttttgacgtagaaaagtttttaatttttttttgatttttgaattttttattggttttttgttttttaaagtgtattttgtttttgttggtttaatgttttagaattttggtgtcgttggttagatattattttgttatttattattcggcgggtggtggttttttggatggtttgtatggagttgttgttgtttagggtattattaagattgaagtttttgttattttttagtaggtagtagtaggtagtgtttttagtttttagtttgattttgatgtttagtagggttttgtatttttgagtttggtattgtttttttgttcgggtttgtgttagttttgattttaggtgtagtaggatttcgttgagttgttttttttgtaaggtatagcgggtttcgattttttttaggttgttttttaagttggtttttagattttttatggagtttaggttgatttttaaggattggattatatattttagtttcgtgagtattattttagtagttttaatttcggtggattgcgtggtgattattgaggtgttttttttaatttgttgagattagtatttgtttagttttttttagttttttcgagttagtttattatattggggtcggatgtttgttatgattttggtaaggtttcgagattgggggtatttatttttatggttaatttagagttggtaatttaggtttgtaggttttttgtaatgtttaattttatttttttttttttatttaggtttgtttttatttgaatagatttttttttagttaagagaattagataaattttattttggtttttttattggtagttttttttttaaggatttaatttgtgtaagttgatttttagtatatttaagaatgtaattaattgataagatattgtggtaagttatatttatagtttttaagaatttatttgtttgataacgtttaaagttttgtatttataattttgtaatagttttaaagtttttgtatttggaattgtttatttttttgtaattatttatttttttaattttttgattatttaatttttgtaaaattgttttaattagacgattttttttttttaaattaaggtataaaagttaattaagtttttttttcggggtcgagagaattttgagcgttagtcgtttttcggtcgtcggttaataaaggatttttaatttattttaaagtgtggcgtttttttaattcgttcgggtataatatttttatttttttttcgtggtttttttttatgaagagtagtttttttttgagagtttcgatttttgtttttagttgtagtcgagtgatattggtgttattagtgattttcggagtttatggatgtggttttttatagattggcgtatggttagttttgttttatatttgattttaaagttattagtagtaagattagtattgttaatttgtagaataatgtaggtattgtttatagtatttgtgaagatttgagtttttaggtttttaatggttttgaagtaatggtttatttttgatttggggtttttttttttataggtgtttttggattttattttttagtttttagtttttggtttttaggttttttattttgtttaggtaggaggttaggtagttgtttaggttttgtacggttttttttttgttttggatgttttttatttttgttagatttttggttattttcgcggttaggttttcggaatttatgttgtttaggtagttggtggagcgggatatggagattcgggaattagagttttcgtgtttgtatagacgttggttatgttgttgattagtcggatatcgtagttgggtgtttggatagaatttagggatcggtagttggtggagaaggtggagcgagtggtgaagtttatgttgtttagggaggagagtgagaggataggatttaggttttgtcgacgattttaatttttttttgagataagatgttattgtgttgtttaggttggagtgtagtggtgttattatagtttattgtagttttgattttttgagatgggtttttgttatattgtttaggttggttttgaatttttggttttaagtaatttttttgtgttggttttttaaagggttgggattatagatatgagttattgtattttgttaattattattattttttaatagtgatagggttttattgtgttgttttagtttgttttgaatttatgattttaagttatttttttgttttggttttttaaattgttgagattataggtgtgaattattgtgtttagtttagtttttaattttaatgaagtttagtttttttttttttgttgtttgtgtttttgatgttatggaatttgaaatagttttatttgggtaagattgatgggtagggagaaagaaggatttgaggggaagggagatggggatggtttgagattttatttttaatttaatttaagattttagtaggtaattgttttatacgaggttttgtagttttatgtatatatgatcgataaattagaatattgaattgtgtttttgaaaggttaattattgaatattagtgggaaatattagtgtgtgaggttgtttttttaaaagttagttttaaatggtatatgtagtaattagaagttaatgttttttggttttaattaagtattatttgtaataaagggaaagtatatatttttgggaaagtttgttatgttttttttgttatattagttatatttttgggaagttaggatatttggtttagatttaaatttattgtttatttggtagtagtttatttttattgaaggaatattttatgggaaagatagttaattttatgtatattagttttggagtaagttttgtatttgtttgaggttatatagtaagttaattgggagttttaatttaggtttttttattttaaatttaaggttgtgtttttaggtcgtgtatttaatataaaattaggattattatttgttgggttttatgattggtattattattatttattgttattattttttgaggttttttacgtgttaggttattgttttggtaatttaatttttttaaagattcggtaaatggttttataattatttttattttattattgaagaaattgaattttggttaaataatttgtttaaggttatatagattttaattgttaagagtttagatttaatttaggtttgattttaaagtttatattttgaattattaagcgagatttattttaaaggtgattaggtcgtgagatatgattttagtacggatttttttttcggatgataagagagtaggtagttaggcgggtatttcgtgttcgcgtatatttagatttcgtttagcgttcgggtaggttatttcgagttttttaattgcgtaggcgtttttatttagaaaggtcgttgggtgcggggagcgtagaggcggtgtagggcggttggttcgtttcggcgtgtagtgcgcgtgcgtggagttgggagttaggttttcggagtgggtcggagatggcggcggtcgacggggttttgtcggaggcggcggttttagagtaattcgcggagttgtttgtttcggtgcgggcgagtatcgagcggaagcggtagcgggtattgatgttgcgttaggttcggttggttgttcggttttattcggcgacggcggttgcggttattggaggtttgggtcgcgttcgcgtttttttttttttttttttcgttttttcggtttttagattggttcgtgtaagtcgagtttcggggttcgggggtcgcgttaatttcgttggcgtatgtgtgtagatttttttcgagtcggagagggaattcgtttagttagtcgttttgttaaagcgttttgtttacgattatagagcgtttttttgtcgtacgcgggttttttgatttttagtttcgggtttttttcgttgtatttcggttgttggtagtttcgatttttcgtttagggatgtagtcgtttcggtcgggaggtgttagttattgttaggtgttagggttttagttgtttcggaaagaggagttagattagtttttgattttggtttttatatttagaattagttgatggaagaggtagattttggtgtttgttagggagagtttttaataattagagttgttaaaagtgtaatggattgttttttatgagtttttcgttattagaagcgtttaaataggaattggaagaacgtttatttatgtggaggagaggagatttagtaattagaattttttatttagtaattagaagaagggattggatagtaaatttttaagattttaatttatagattttatgagtttattttttggatatgtgatttttgcgattttttggtaaaaattagttgtttaaaacgtgtttattgattgaagtaaattaaggattgtttttatgcgatattggtattgttagttttttttattttagatattttggtgagagtttaatgatattttattatggttttaatttgtatttttttaatgattagagataatgagaatttttttatgtgttttttggtcgtttggatatttttatttgtgaagtgtttgtttaaattttttgtttgtttttaaaagttgggttgttttttattgatttagaggattttattatgtattttgaatgtgagttttttgttagatatgtatacgttagattttttttttttaaggttttattttttgtggttttagttatttataattaattatggtttaaaatatgaaatggaaattttcgggtgtatacgtgcgtacgtatatatatataacgtattttattgttggagttttagttgagattattttgtatttttagataaatttgtgaagaattgacgtttttataatattgaggtttaaaatttatatatagtatatttttttatttaagttttttttgattttttttagtgttttgtagtttttagggtagaggttgtatatatttttttttaggttgttattttttaattttaattgtagatttttgtggatattttatatatataattatattatttgtgaatagatgttgttttatttttttttttttattttttatgtttttttggtttttttgttttgttagattagttgggatttttagtataatgttgaatagaagtagtgattgtggatatttttgtgttgtttgagatatattgaatttaaaggaattttttatttatgaataaggtaatatataggtttatttattttaattgttgattgtttttatttatttttgtagg

SEQ ID NO: 62 - DNA, 6801 bp, Artificial Sequence
  chemically treated genomic DNA (Homo sapiens)
tttataaaagtaagtaaaagtagttaataattgaagtaggtaagtttgtatgttattttgtttataaatagaaaatttttttgaatttaatatattttaaataatataaggatgtttataattattatttttatttaatattatattgaaggttttagttagtttaatagagtaagaaaattaaaaaggtataaaggatgaaaagaaagaagtaaaatagtatttatttatagatgatgtaattatgtgtgtaaaatatttataagaatttataattagaattaagaaataataatttaggaagagatgtgtataatttttgttttgaaaattataaaatattaagagaaattaaaaaggatttaaatggagaaatatattgtgtatggattttaagttttaatattataaaaacgttaattttttataaatttatttaaagatgtaaggtgattttagttagaattttagtagtggggtgcgttgtgtgtgtgtgcgtgcgtacgtgtgtattcggaaatttttattttatattttgggttatggttgattgtgggtaattaaagttatagaaagtgaaattttggaaaagggaggtttaacgtatgtatatttgataaaggatttatatttagaatatataataaaattttttaagttagtaaaagataatttaatttttaaaaataggtaaaagatttgaataggtattttataaatgaggatatttaaacggttaaaaagtatatgaaaaggtttttattatttttaattattaggaaaatataaattaaaattataatgaagtattattagatttttattagaatgtttaaaatgaaaaagattgataatattaatatcgtatggagatagtttttaatttattttaattaataaatacgttttgagtaattagtttttgttaagaaatcgtagaggttatatgtttaagaaatagatttatggaatttatggattagaattttaaaggtttattatttagtttttttttttgattgttgagtaggagattttgattgttgaatttttttttttttatataagtaagcgtttttttagtttttatttgagcgtttttagtaacgggaagtttatgagaagtaatttattgtatttttggtaattttaattgttgaaagttttttttaataaatattaagatttgttttttttattaattagttttaggtatagaggttagaattaagaattagtttaattttttttttcgggatagttgaggttttgatatttggtagtggttgatatttttcggtcggggcggttgtatttttaaacgaaaaatcgaagttgttagtagtcgaggtgtagcgaagaaggttcggggttgggggttaggaggttcgcgtgcgatagaggaacgttttgtggtcgtggataggacgttttgataaggcggttggttgggcggatttttttttcgattcggggagaatttgtatatatacgttagcggagttgacgcgattttcgggtttcgggattcggtttgtacgagttagtttggggatcggggaggcggggagagggaaggggaaagcgcggacgcggtttaaatttttagtagtcgtagtcgtcgtcgtcgagtagggtcgggtagttagtcgggtttggcgtagtattagtgttcgttgtcgttttcgttcgatattcgttcgtatcgaggtaggtagtttcgcgggttgttttaaagtcgtcgttttcggtaaagtttcgtcggtcgtcgttattttcggtttatttcgaggatttagtttttagttttacgtacgcgtattgtacgtcgaggcgagttagtcgttttgtatcgtttttgcgtttttcgtatttagcggtttttttgagtgagagcgtttgcgtagttaaggggttcggggtggtttgttcgggcgttgggcggagtttgggtatgcgcggatacggagtattcgtttaattatttgtttttttgttattcgggagaagggttcgtgttgagattatattttacgatttggttatttttaaaataggtttcgtttggtgatttagagtataggttttggagttaggtttgggttaagtttgagtttttgatagttaaagtttgtgtgattttgggtaagttatttaattagagtttagtttttttagtggtaaaatgaggataattatggaattatttatcgagtttttgggaggattagattgttaggataataatttggtacgtagaagattttaaaaaatggtaatagtgagtagtagtagtgttagttatagagtttaatagatgatagttttgattttatgttggatatacggtttagagatatagttttagatttaaaatgagaagatttgggttgaaatttttagttaatttgttgtgtgattttaggtaaatgtaggatttgttttaaggttgatatgtataaggttggttattttttttatggaatatttttttagtgaggatgagttattgttaggtagatagtgggtttggatttgggttaaatattttgattttttaaaagtgtggttagtgtaataaaagaaatatagtaggtttttttaaaaatgtatgttttttttttgttataaataatgtttaattgaaattagaaaatattaatttttaattattatatgtattatttaggattggtttttagaaagataattttatatattgatgttttttattaatgtttaatggttaattttttagaaatataatttagtgttttaatttatcggttatatatatataaagttgtaaaatttcgtataaagtagttatttgttgaaattttaggttgaattggagatagaattttaagttatttttattttttttttttttagatttttttttttttttatttattaattttgtttaggtgaaattattttaaattttataatattaaaagtataagtaataaaagaaaaaaagttggattttattaaaattaaaaattaggttgggtatagtggtttatatttgtaattttaatagtttgggaggttaaggtaggaggatgatttgaggttatgagtttaagataagttgaggtaatatagtgagattttgttattattaaaaaataataataattggtaaggtgtagtggtttatgtttgtaattttagttttttgggaggttaatataggaggattgtttgagattaggagtttaagattaatttgggtaatgtaataagaatttattttaggaggttaaggttgtagtgagttgtgatggtattattatattttagtttgggtaatataataatattttgttttaaaaaaaaattaaagtcgtcggtaaagtttgagttttgtttttttatttttttttttggatagtataagttttattattcgttttattttttttattaattatcggtttttgggttttgtttaggtatttagttacggtgttcggttggttagtagtatagttagcgtttgtataggtacgggggttttggttttcggatttttatgtttcgttttattagttatttgagtagtatgggtttcgggggtttggtcgcggggatggttaggggtttggtaggaatgagaggtatttagaataagaaggagatcgtgtaaaatttgaataattgtttggttttttatttggatagaatgaggagtttggaggttaagaattggaagttggagagtaaaatttaggagtatttgtagaagaagggattttaggttagagatgagttattattttaagattattgagggtttgaggatttagatttttataaatattgtggataatgtttgtattgttttgtagattgataatgttggttttgttgttgatgattttagagttaagtatgagatagagttggttatgcgttagtttgtggagagttatatttatgggtttcggaggttattgatgatattagtgttattcggttgtagttggagatagagatcgaagtttttaaggaggagttgttttttatgaagaagaattacgaagaggaagtaaaagtgttgtattcgagcgagttaaaaaaacgttatattttgagatgaattaagagttttttattagtcggcgatcgagagacggttaacgtttaaaattttttcggtttcgaggaaggggtttgattaatttttatattttggtttagaaagggggggtcgtttagttaaaataattttatagaagttaagtagttaaaaagttaaaaggataaatggttataggaaagtaaatagttttagatgtaggggttttaagattattataaggttatagatgtagggttttgggcgttattaaatagatgaatttttggggattgtggatatagtttgttatagtattttattagttaattgtatttttggatgtgttgggagttagtttgtataagttaagtttttgaggaaggggttgttagtgaaagagttaagatggagtttgtttggtttttttagttaagggagagtttgtttaggtggaaataagtttaggtgaaaaaggaaaaatgaggttgggtattataaaaggtttataagtttagattgttagttttgggttgattatggaggtagatgtttttagtttcgggattttgttaagattatggtagatattcggttttaatatgatgagttggttcggaagaattgagaggagttggataaatattggttttagtagattgaggagagtattttagtggttattacgtagtttatcgaggttggagttgttgggatgatgtttacggagttgagatgtatagtttagtttttgaagattaatttggattttatgagaaatttgaaggttagtttggagaatagtttgagggaggtcgaggttcgttatgttttgtagagggagtagtttaacgggattttgttgtatttggagttagagttggtatagattcgggtagagggatagtgttaggtttaagagtataaggttttgttgaatattaaggttaagttggaggttgagagtattgtttattgttgtttgttggaagatggtaaggattttaattttggtgatgttttggatagtagtaattttatgtaaattatttaaaagattattattcgtcggatagtggatggtaaagtggtgtttgattaacgatattaaagttttgagatattaagttagtagaagtagggtatattttggggagtaggaggttaataaaaagtttagaggttaaaaaaaaattgaaaatttttttacgttaaagaatattatgaagaaaattggggtaaaaattttatagaatgggagaaaatatttgtaaattagatatttaataagggtttagtatttagaatttataataaatatttttagtttaataatagaaagataatttaatttaaaaatgagtaagggatttaaattgatattttttcgaagaggatgtattgatggttaataaatatatgaaaatatatttattattagttattagggaaatgtaaattaaggtatagtgagatattattttatatttttaggtaagttttttttttgtaattttaattttgttaataaatttttttttttagttttttttttattattatttttttttttttttttttcggtttcgtttttttatttttttattttggttttttattttaattttttttttttattgtatattcggttttgtatttaatttttttttgttaaaggttatttttattattaaaggttttataaagttttttttttgagaaaggtgttagggtcgaaggtatagtttaagtttatgtttttttttttttagttaattttttttagtttaaaaagagatttagttttttttttatcgattttagttttttttataaggaatttttgtatgttattgaattttatgattttatttggtatgacgtttatgttattttttattttttttttatttcggatgatagggaatgtatttagataattatttaggtttatgtagatattttttattaataagatgttgtttataattttatagggattttagttgtttttagaattgattttaattgggattatgaagtagtttttttagatagatagaaacgaagttatatgatattatgttttttagttggtatggataaagttgtttttaaggttgtaaattttgaaaagataaaagaaattatttaaggttttaatgaaaattttgttttttttttttttcgtattttagaggttataattaattatattattttaagttttgatattaatgggggtagaatttatttatttatttatattttattttttagttagtttttaacgtttgaaagaaatttaaaaaattagaagatggtttttaaattttttaaagagatttaattaaagtggtttttatggtttttaatgatgatggttagaatttaaaaaaagaataaaagaaagaaaagaaaagaagtattggtaaagatgtaaaaaaaattggaatttttatatattattggtgggaatgtaaattagtgtagttgttacgaaaaatagtttgttttttaaaatacgaaatataggattattatatgagttagtaattttatttatgagtatgtttttataagattaaaaataggtgtgtgaagaaaaatttgtatataaacgtttacgtagtattatttataataattaaaagttggaaattatttaattgtttattaattgatgaatggataaataaaatatagtatat

SEQ ID NO: 63 - DNA, 5562 bp, Artificial Sequence
  chemically treated genomic DNA (Homo sapiens)
tttttatgttttcgtgaaatggttttttttagtttttttaatttttcgttaattttcgtttatttcgtagttttttttaatgaatttcggttttagtaataggtattttttttttttagattttgttatggttattttttagattttttaacgagggttttttgttgttttttttggttatttttaggttttgtttaaggtgggtttttttagttttttcggttttttttttttttattatgtggtggtttttttttatttaatttataggttttttttttattttatcgaggggttttttagttttttttttttttttttcgagggtgcgtttttttttttatgtcgggatgggggttttttttaagttttttaggtttttttttaatttattaacgttggttgggtgattttcgattttattttttttttatagtttttttcgattagtgttttttttttgtatttaaagtcgtttttatttttttattaggttttattatttttttttttgtgattgaaagttttttttagttttgtataaatatttttgttttttattggttttttttattgtttttttttttttttattattttttaggtttggggtggttttttttatttaatttatgtttatttttttttttttattttattttttgagataggtttttttttgttgtttaggttggagtgtagcggtgtgtatttagttcgttgtagtttcgattttttaagtttaagtgatttttttgttttagttttttaagtggttgggattataggtatgtgttattatgcgtaattatttttttttttttttttttgtagagatggatttttttttgttgtttaggttggttttaaatttttgggtttaaacgatttttttattttaattttttaaagtgttgggattataggcgtgaattatcgtgttcggttttttttttattttatttatttatatttttttttttttgtttttgttttttttttttacgatgatttgtttagttaggtacggtagtttatgtttgtaattttagtattttgggaggtcgaggcgggagaattatttgaggttaggagttagagattagtttggttaatatggcgaaatttcgtttttattaaaaaatataaaaattagttaggtgtggtggtacgtatttgtaattttagttattcgggaggttgaggtaggagaatcgtttgaatttgggaagtggaggttgtagtgagtagagatcgcgttattgtattttattttgggtgatagagcgagattttgttttaaaaaagaaaaaaaatgatttgttttatattttaaggttattatttattttttgtttggggtgattttttttttgttttttttattattttaatattttattattattttttttttttcggttaggaatgattttttttttgattatatttatatttttttattttagtttagttttttttttttttatttattttttattatttttattttttgttagttagatttttttttttttattatttttttgttttttatagtgtttttttttattttttttttgtttaagaaagtttattaatttttattttttttatattttttttttttttaggatagtgttatttttagaattttgtgataataatgatttttattatattatttatttttgttttttttattttatgatggttttttttttttttttgttttttattgatttttttttacgttttcgttttgagaattatgatgatttttttttagtatggtagttttttttattttgaaggtatattttatttttttattaggttttaggttatatttttttatttgaagtagttttttcgattaggagtatatatgtgtttttgttattgttgtaggtttttatttggttatggtatttgtttttcgtcgtcgtatatatttcgtagtgtagtgggtattttgtagtgtagatagagggcgaggttgtagttatgggtggtgtggttttcggattacgattttgatttaggatttttgtgttttgagagaggagggattagtagttttttggttttttatgggcgggatgttgattattgtttaaggaattgtttagagttggacgaagaagtagtggtgatgttagtaaagttgtttttaggggcgggaagcgattttattatgaagtttgtttgtttaattatatggttggggattttggatgttagggttcgttgagaaagtttaggggtagggaggggtcgtgatggaggtttttatggatttttgtgaaattttaggtttagttggtttttgaatgtgggatttttttttttgaaggtgttatgtaggttttgtagatagtaggagtttaggtagggggttttgaggttagggtttgtattttaggttaaggagggagagtgaggattaggagggtagaggatttgaattttttggttttgagagaggggatagttaggggtttagaaatttgggttttggggaaagtgaggtttatttggatttttgtgtgtaggggaggagggggttggggtttgaattttttagtttaaggagaaaggaaatttttttattttttttaaaaaaatatattatatgatattaatgtattttttttgagatggagttttgttttgttatttaggttggggagtgtagtggtacgattttggtttattgtaatttttgttttttagttttaagtaatttttttattttagttttttaagtagttaggattataggcgtttattattaagtttagttaattttttttgtatttttagtaaagacggggttttattatgttggttaggttggttttgaatttttgattttaagtgatttatttgtttcggttttttaaagtgttggggttataggtatgagttatcgtatttggttttttttttttttttttttttttaattatatttttaaagatttttttttttagttatgtttttatttgattttttagaattgagatgtgtttgggattttttttggaggatggaggatttagagtttattaagttttttttttagggatttaattataggagttttttttttttgggatttttaggttttttttttttttatttttggttttttttatgaatttgaatttttagaatgttttttcgtttattttgaggatttgttgaaggttttttttttttttatattttttttttttttaatttgggatttttttttttttgaggttttagagatagtttaggttttttgttatttattaagatttaggagggtgtagagtaatataaaggttagtagaaaggtttttggttttttggagagttttatggtgtgtgtattagtagtatttggtttttagtttttataggaagttgaggaggggtgggtttggatttatatttattttacggggagaaatagttgaggttagaatttagggtagttttttgtggttttcgggttgggaaggtagaattagaatttaaaagtgatttgggtattttgtgtttagttttttatttttatggagattttaggagtttgggtttttattttttttttttattagaatttagaaagttattattttgtttttttatttttttacggtttattgttgtttgtttgtttgtttgaagattaagacggagttgggttttttgatttttagtggttgtaagaattgggattttttttttttttttttttttttttttttttttaaggaagtatttagtgtgggtagggttttattttggagtatttagtatgtttaggttggttttgcgggtgcggggtgttttgtttttttttttttttttttatgtgttcggtttatattttttgtgtgtttgggttgtttttagttgcgattttatttagggttgtatttttgggtttttaaggtatcgaatgaatagagggatgtttgtcggtagttataggcgggcgtagtaaaagatagatgtttatagtttatatattgggaaattgaggtttttgtggaagaattttaggataggggtgtgtgtgtgtgtgtgtggtgggggttgggtatatgttttgtgttatatttaggacgtagaattttttttttttggttttaggtataaggttgaaagagatttgttaatttttttcgcgcgtgcgcgcgcgcgtatgtatgtatatgtgcgtgtgtgtgtgtgtggtaaggggatagagagaagagtgtagtcgtttgagttatttgaagagattttgttgcgtagaatttaggttttttacgaaattacgaaaatttatttagatttgttgttttagtttagcgtagtcgtttacgtttgtagttttagtattttgagaggtcgaggtaggtggatcgtttgagttgaggagttcgagattagtttgggtaatatggtaagattcgtcgtttttttattttatgtttttataaaaaatataaaaattagtcgaatgtggtggcgcgtgcgtgtaattttagttatttaggaggttgaagtgggaggattttttggttttaggagataggggttgtagaaagtcgagatcgtgttattgtattttattttgggtgagagagtaagattttgttttaataaaaaatttttaaaaaataaaataaataataatatagtaaaaagatttgttttttcggttttagtgtgggcggtaattttatcgtgtaatgagaaaggcgaattttttttagatattaatttcggaggtcgtttttgttgttaggtttttagaaagtagggttcggacgttattgggaggcgaggttagagcggggttgtgtgtggcggagggaggcggggttggaggaaacgttcgttgttaaggaacgtagcgtttttttcgttttggagaggcgcgattgggtttgcgtagtgtcgacgtcggcgtcggcgcgtcggggtttgaaaggttcgagtttcgcgcgtttgcgtattttagttagcgtagggcgtatttcgtttttttttattttttttgtttttcggattttatattttattttatttttttggttaggcgaagtttacgacgttgatatgtcggagattcgttttcgttatgtcgtgttttgtagtagttaggattcggtgagggatttgtatgggggaggttggaagacgtgagggaattaatgaggatagtttttaaaagagtttttggggtttttttggaagtttaaggagagttatggggggatttttaggaggttaaaagtgaattgtggagagatgttgaattagggacgtttcggcgtttagggaattttcggagagaaaaggaggaatagggaagtttttttggagagtttataggtgaatttttacgggaaagtgttgtaggggaaattttaggtagagtgtcgggggattaacgggagagtttaaatttgggggtcgtagaggttttgggaggatttaaaggaattatttgagagttggaggtttagttgttatttttgtgttttaattttttttttttattgttgtttttaga

SEQ ID NO: 64 - DNA, 5562 bp, Artificial Sequence
  chemically treated genomic DNA (Homo sapiens)
tttggaaataatagtgggagaggagaattagggtatagagatgatagttaggtttttagtttttagatgatttttttgagtttttttaaggtttttacgatttttagatttaagttttttcgttaatttttcgatattttgtttggagttttttttataatattttttcgtggaagtttatttatgggttttttaagaaagtttttttattttttttttttttttcggaagttttttagacgtcggaacgtttttaatttaatatttttttataatttatttttagttttttggaaatttttttatgattttttttagatttttaagagaattttaaaagtttttttaagagttatttttattaatttttttacgttttttaattttttttatgtaggttttttatcgagttttggttgttgtaggatacgatatggcggaggcggattttcggtatgttaacgtcgtgggtttcgtttggttagaaggatgaggtagagtatggggttcgaggggtagggagagtgggagggggcggggtgcgttttgcgttggttaaagtgcgtaagcgcgcgaggttcgggttttttaaatttcggcgcgtcggcgtcggcgtcgatattgcgtaagtttagtcgcgtttttttagagcgggaagagcgttgcgttttttagtaacgagcgttttttttagtttcgttttttttcgttatatataatttcgttttagtttcgttttttaatgacgttcgaattttgttttttgggagtttagtaatagaagcgattttcgggattggtgtttggaagaaattcgttttttttattgtacgatggagttatcgtttatattgaagtcgagaaagtaaatttttttgttgtattattatttattttattttttaaaaattttttgttgagatagggttttgtttttttatttaggatggagtgtagtggtacgatttcggttttttgtaatttttgttttttggggttaagggatttttttattttagttttttaagtagttgggattatacgtacgcgttattatattcggttaatttttgtattttttgtggagatatggggtgagagggcggcgggttttgttatgttgtttagattggtttcgaattttttagtttaagcgatttatttgtttcggttttttaaagtgttggaattataggcgtgagcgattgcgttgggttaggatagtaaatttgagtgaattttcgtagtttcgtagggaatttggattttacgtaataggatttttttaaatggtttaggcggttgtatttttttttttgtttttttgttatatatatatatacgtatatatatatatatacgcgcgcgcgtacgcgcgaaaaaaattagtagattttttttagttttatgtttgaggttaaaagagaagggttttgcgttttaaatataatataaagtatgtgtttaatttttattatatatatatatatatatttttattttggagtttttttataaaagttttagttttttaatatgtggattgtgggtatttgttttttattacgttcgtttatgattgtcgatagatatttttttgtttattcggtgttttggagatttaagggtgtagttttgggtggggtcgtagttggagatagtttaaatatataaggagtgtgagtcgagtatatgaagagaggggaagggagataaggtatttcgtattcgtaggattagtttggatatgttgggtgttttaaggtggggttttatttatattgggtgtttttttgggaggagaggggaagagagagaaggagagggaattttagtttttgtagttattgggaattaagaggtttaatttcgttttggtttttaagtaaataaataaataataatgggtcgtgggaaggtgagaaaatagggtggtgattttttgggttttaatagaagagggggatggaagtttagatttttggggtttttatggaggtggggggttgggtataagatgtttaggttatttttggattttggttttgtttttttaattcggaggttatagaggattgttttgggttttgattttagttattttttttcgtagggtgaatgtgggtttagatttatttttttttagttttttataaaagttggggattaggtattgttgatatatatattatgaggttttttaggagattagagatttttttgttggtttttgtgttgttttgtatttttttgggttttggtaagtgataagggatttgaattgtttttgggattttaggaagagagaggttttagattgagagagagagagatatagagagagaaagagtttttagtaagtttttaaggtgaacggggaggtattttggaaatttagatttatggaagaggttaagggtaaaggaagagaaagtttgggggttttagagaagaaaagtttttgtgattggatttttgagagaggggtttggtgggttttgaattttttattttttaggaaggattttaaatatattttaattttaggaaattagatgagagtatggttggaaagggaaatttttaaaaatataattaaaaaaaaaaaaagagggagaaggttaggtgcggtggtttatgtttgtaattttagtattttaagaggtcgaggtaggtggattatttgaggttaggagtttaagattagtttggttaatatggtgaaatttcgtttttattaaaaatataaaaaaagttagttgagtttggtggtgggcgtttgtaattttagttatttgggaggttgaggtgagaggattgtttgaaattgggaggtaaaggttgtagtgagttaagatcgtgttattgtattttttagtttgggtgatagagtaaaattttattttaaaaaaaatatattaatattatatgatatatttttttaaaagaggtagagagattttttttttttttagattaagaagtttaggttttagttttttttttttttgtatataggagtttaagtaagttttattttttttaggatttaggtttttgggtttttagttgtttttttttttagaattaagaagtttaagttttttgtttttttggtttttattttttttttttgatttgggatgtagattttagttttagggttttttgtttgagtttttgttgtttataagatttatatggtatttttaaggaggagaattttatatttaagaattagttggatttgaagttttataaaagtttatggaaatttttattacgatttttttttgtttttgagtttttttagcggattttggtatttaaaatttttagttatgtaattaggtaaataggttttatggtggagtcgtttttcgtttttggaagtagttttgttggtattattattgttttttcgtttaattttggatagttttttgggtagtggttaatatttcgtttatgaaaaattagggagttgttggtttttttttttttaggatataaaagttttaagttaaagtcgtggttcgaagattatattatttatgattatagtttcgttttttgtttatattgtagggtgtttattatattgcgaaatatgtacggcggcggggagtaggtgttatggttaaatgaagatttgtagtagtgataaggatatatgtgtgtttttggtcgggaaggttattttaagtaagaggatgtggtttgggatttggtggggaggtggggtgtatttttagggtggaagagattattatgttgaggggggattattatggtttttaagacgggagcgtgggaagaaattagtggagagtaggaaagagggaaagattattatgagatggagggaatagaaataagtggtgtgatagaaattattattgttatagaattttgaaaatgatattgttttaaagagaaggaaaatgtgggaggggtgagagttaatagatttttttaggtagaagaggggtaaggaaagatattgtggggggtagagaaatagtgagaggggaagaatttaattggtaggaggtggaaatggtggggagtggatagagaaggaagaggttgggttggggtgggaaagtgtaagtgtaattagggaagaggttatttttgatcgagggaggagagatgatggtggagtgttggagtggtggaagagatagaaaagggattattttaaataggagatggatgataattttgaagtatggagtaaattatttttttttttttttgagatagagtttcgttttgttatttaggatggagtgtaatggcgcgatttttgtttattgtaatttttattttttaggtttaagcgatttttttgttttagtttttcgagtagttggaattataggtgcgtgttattatatttggttaatttttgtattttttagtagagacggggtttcgttatgttggttaggttggtttttaatttttgattttaagtgattttttcgtttcgattttttaaagtgttgggattataggtatgagttatcgtgtttggttgagtaaattatcgtaaagaggagaagtagagatagggagggggagatgtggatgagtaaaatgaaagggaggtcgggtacggtggtttacgtttgtaattttagtattttgggaggttgaggtgggaggatcgtttgagtttaggagtttgagattagtttggataataaaaagagatttatttttatagaaaaaaaaaaaaaaaaatagttgcgtatggtggtatatgtttgtagttttagttatttgggaggttgaggtaggaggattatttgagtttaggagatcgaggttgtagcgagttaagtgtatatcgttgtattttagtttgggtaatagagggaaatttgttttagaaaataaaatggaagagagaagatgggtatgagttaaatgaaagagattattttagatttgaaaaatgatggaggagaaagggagtaatggaagagattagtgggggatagagatgtttatataaagttgaaagagatttttaattataggaggagagatgatgaggtttggtgagggaataaaggcgattttgggtgtagggagaaaatattggtcgggagaggttgtgaaaggaaagtgagatcgaaaattatttagttagcgttggtgggttaaggaaggatttgaaaggtttgaagagaatttttatttcggtatagaagaggaaacgtattttcgggaagggaggagagagagttgggggatttttcgatggagtgaagggggaatttgtgaattgggtaggaagagattattatatggtggggagggggaaggtcggggagattggaagaatttattttaaataagatttgaaaatagttaagaggggtagtaagagattttcgttgggaggtttgaggagtgattatggtaggatttgagagaggaggatgtttgttgttgggatcggggtttattggaagagattacggggtgggcgggggttggcggggagttgaggaggttggaagagattattttacgaaggtatggggg

SEQ ID NO: 65 - DNA, 5360 bp, Artificial Sequence
  chemically treated genomic DNA (Homo sapiens)
aagattagtttggataatatggtgaaatttggttgttattaaaaatataaaaattagttaggcgtggtgttgtacgattgttgttttagttattcgggaggttgaggtaaaagaattttttgaattcgggaggtggaggttgtatcgcgttattgtattttagtttgggcgatagagcgaaattttgttttaatttaaaaaaaaaaaagtttttttatggtagggttatttttttttttgtaattaataagtattttgtagggagatattttaggttatagtttgtttttaattatatttttatttagtaattttagtattaattgattatttttaatttttttttttaaattattattgtggtaatttgtttttttttttttttttttttttttttttttagatagttttattttgttattaggttggagtgtagtggcgttataggtatgagttattgtgttcggtttattgtggtaatttttaaatattttaattttaggtttaggggtacgtgtgtaggtttgttatataggtaaatttatgttatgggggtttgttgtaggaattatttcgttatttaggtattaagtttagtatttagtagttattttttttgtttttttttttttttttattttttagtttgaagtaggttttagtgtgtgttgttttttttttttcgtgtatgagtttttattatttagtttttaattataagtgataatatgtggtatttggttttttgtttttgcgtttttttgttaaggatagtggtttttagtttcgtttatgtttttgtaaaggatatgattttgtttttgttttgttttttttttttttgagatagagttttattttgttgtgtaggttggagtgtaatggtatgattttagtttattgtaatttttatttttttgtttaagtaatttttttgttttagtttttcgagtagttggtattatagttatgtattattatattcggttaatttttatatttttagtagaggtaggattttgttatgtttgttaggttagttttaaatttttgattttaggtgatttattagttttagttttttaaagtgttgggattataggcgtaagttattgatgattttttttttaggaggtaaaatattatgtgtttttaaaagttagagttggttagttatggtggtttatatttgtaattttggtattttggggatggcgaggttggtggattatttgaggttatgagttttagattaatttgattaatatggtgaaattttatttttattaaaaatataattagttaggcgtggtggtaggtgtttgtaattttagttattgaggaggttgaggtatgagaattatttgaatttagagatagaggttgtagtgagttaggattttgttattgtattttagtttgggtgatagaataagattttgttttagaaaaaaaagaaaaaaaaaattggagttattaaaaaaagttatatatagggaagtgttttttattttattttttttattttatttttattttttattttttttaatttatttttatttatttttcgtagataaagaattttttttgttttttatgtattttttttgtgtttttttttatttaaatgagtagagatatgtgtatttttttttttttttttttttgttataagaaagttagtaaattgtagatatttttttttttttgttttttttatttaatattatattttggaaattattttttatagatgtatagagattttggttattttttgttgtagttgtatagtgttttattttgtggtagtgtcgtattgtttttaattatttttttatgtataaatatttaggttatttttaagattttgtaattataaattatgttgtaatatgttttttttgtatatacgtttttgtaatgttggaagtatgattttaagttaaatttttagaagtaggattgttgagtgaaaaagttaataaatgcgttattttgttagatagtgttaaaatcggttaggtgtagtggtttatgtttgtaattttagtattttaggaggtaggaggattatttgagtttaggagttgtaaattagtttaggtaatatggcgaaattttatttttattaattaaaaaaaaaaaaaaaaagatattgttaaatttttttttaaaaagatcgtatgtttttatgtttattagtagtttgtgagagcgttttaagtatttttttaaacgagaagtgatgttttcggagtattaaaattgaagtgattttaaaattatgttgtatttatacgaataggtgtgtatttaatggattaaattagtttagttgatatgttttttttattaggaatagtgtggagattgaaaaattaatttagtttagagtagttatttaattgtaaagtttttttttttaaatattgatttattatgtgaggaaatatttattttgtatagaagtgtgtggaattggacgagggggttgatttatatatgtggtttggtatatatatatttttattatagagggtgtaatgaagatataggtggtttagtattataggaaagggaaaaaagaaaaaaaaaagacggtagaggtggttttttaagtatttatttttattttttttgttaatgatttataatttgttgttattgttgttatttattgttttttatatttttttataaggtttgtgtgttttgaaaaaatatgtttttatttcggatagaagtggggtatatagggttaggcgcggtggtttacgtttgtaattttagtattttgggaggtcgaggtaggtagattataaggttaggagttcgagattagtttggttaatatggtgaaattttatttttattaaaaatataaaaattagtttggcgtggtggtacgtgtttgtagttttagatatttgggaggttgaggtagaagaattatttgaattcgggaggtagaggttgtagtgagtcgagatggtattattgtattttagtttgggcgagagtgtaatgagatttcgtttttaaaaaaaaaaaaaaaaagaaaaaaagaaaagtaagtggggtatacgatttaggtttaagttaattagattaattttatttttgatggttgttaatgttttagatacgggttcgtagttttacgtagagaagaggttaaggtagaaaatatgaatttgaggtaaaaagaaatgaggtatttgtttgttttattaagttttttaattaaattaattttgaagtttgttttatttttggatttttagtgatgttattcggtaaagtttatttgttttaggacgtaagagttgggttttttgtgatttggaattaaaattattttaatttataaaatgagtaattttaatattatttatgagaaatattttattggtatatgtttttttttagcgtttttgaaaattaaattaggtgggtgaaaagtatatttttgtatgaaatttttttattttagaaaatattttgttattttgataataatggttaatgttattatatttaaatttttgtttttttttttttttgagatagagtttcgttttgtcgtttaggtgtgatggcgcgatttcggtttattgtaatttttgtttttttggtttaagcgatttttttgttttagtttttttgagtagttgggattataggtatgcgttattatatttggttaatttttgtatttttattgtagacggggttttattattttggttaggttggtttcgaattttcgatttttagtgatttttttgtttattttaaaaagtaatttgataaatttataggttcggtatattttaaaaatttttttaaatatagtatatttttttttttttttttagaattaattatgaatcgtatatatagttagaggtttttaattcgagaacggataaaggggtttgtttgtgtaatataattatttttaatggttaaataaattaatatataagattagttttatttaatataataataacgaattaaagtttataatagataagaaaagtattagttgttttcgttatttcggagcgatttttaaggggacgcgggagagcgtcgcgggggacgcggaagtttgacgttataggaattgggggcggggcggggaggttcgtatattttattgcgtatgttttcgttttttcggtcgcggtttggcgtagtgcgtacgcgcgcgggtgggcgggtttgattggtcgtagagtttgcgtagttggtgaatggcgttggtggcgggaaagttgagttttttttgcgtcgagttttcggggcgatgtgtagtgttttttatagggttgagtttgggatcgaggtgagagtcgtcgggttgggagtgagggagatgggaataaggtcgtcggtgggcgaggggagtcgagggaattcgggggattgggaggtttggggcggcgcggtttggtcgggttgggatcggtttttcggtttagacgttcgcgatgttggtattttttgttattttttatttgggttttaggggttcgtttttgggtagtttggagtttttcgaggtgggaggatcgggcggaggtggaggaagtttttttttggaagatttgttgtttgtttagatcgatataatatacgaggtttttttttttaagagttatggtttaaaaattttttataaattaattatcgttggaaatgttaagttatgtaagaaaagttagaaaaggggaggggtcgttcgttggagtatttggagtttttttggaataggtggtgtttgcggaggttgttttatttttttgtagtttacgtgtttttgtttagggtagttggttttcgttattttttagtattcgtttttagtttaggtagttttagagttatataagtcggtggatgttttttaagaattgaattaagtgtttagtatttattgtgtgttaattacgtgttaagggataggagtaagtaataaaagatataatttttgttattaaagaattagtaagggaggttgttgtaagaattatagtattgtataaaagtttgttgtttattagaggggcgggtattatggaagatgtaggaggagatgattgaagttttaaggattatttgaaatggtttggtaaggagaggatgatatttagagcggagatagtcgggagtatatggattttgaattaagtaagagtatggttaatttagataattgtaagtatttttgtaaaattggaataaagggagtgagggataataggttgggaagtaagcgttgagtagtgggtagggtatgaaggattttttatgtagatgagagaggaagtaattttaaaagagtt

SEQ ID NO: 66 - DNA, 5360 bp, Artificial Sequence
  chemically treated genomic DNA (Homo sapiens)
gatttttttgagattgtttttttttttatttgtataaaagattttttatattttgtttattgtttagcgtttattttttaatttattgttttttattttttttgttttaattttatagaaatatttgtagttatttaaattagttatgtttttgtttaatttagaatttatgtattttcgattgttttcgttttgaatgttattttttttttgttaaattattttaaatggtttttgaaattttagttatttttttttgtattttttatgatgttcgtttttttaatggataataaatttttgtgtaatattgtaatttttatagtagttttttttattagttttttaatggtagaagttatgttttttgttgtttatttttattttttaatacgtagttgatatatagtaagtgttggatatttggtttaatttttgaggggtatttatcggtttgtgtggttttggagttatttgggttggaaacgaatattagggggtggcgagggttagttgttttaagtagagatacgtgggttatagggaggtgaggtaattttcgtaaatattatttgttttagaaaagttttaaatgttttaacgggcgatttttttttttttttagttttttttgtatagtttgatatttttaacggtagttaatttgtgaggggtttttagattataatttttgggaggagagatttcgtatgttatatcgatttgggtaggtagtaagttttttaaagaaagattttttttattttcgttcggtttttttatttcggaggattttaggttgtttaggggcggatttttggggtttaggtgagaggtggtagagggtgttagtatcgcgggcgtttaggtcgagaggtcggttttagttcggttaggtcgcgtcgttttaagttttttaatttttcgggttttttcggtttttttcgtttatcggcggttttgtttttattttttttatttttaattcggcggtttttatttcggttttagatttagttttatggaaggtattatatatcgtttcgaaggttcggcgtaggagagatttaattttttcgttattaacgttatttattaattgcgtagattttacggttagttaaattcgtttattcgcgcgcgtgcgtattgcgttaggtcgcggtcggggaggcgggagtatgcgtaatagggtgtgcgggttttttcgtttcgtttttagtttttgtgacgttagattttcgcgtttttcgcggcgttttttcgcgtttttttggagatcgtttcggggtggcggggatagttggtgttttttttgtttgttgtaaattttggttcgttattattatattaggtaaagttggttttatgtattaatttgtttaattattaaaaataattgtattgtataagtaggtttttttgttcgttttcgggttaaaagtttttggttgtgtgtgcgatttatggttaattttggaaaaaaagagaaaagtatattgtatttaaaagaatttttaaaatatatcgagtttgtggatttattaagttgttttttgaggtaggtaggaggattattggaagtcgggagttcgagattagtttggttaaaatggtgaaatttcgtttatagtaaaaatataaaaattagttaggtgtggtggcgtatgtttgtaattttagttatttagggaggttgaggtaggagaatcgtttgaattagggaggtagaggttgtagtgagtcgagatcgcgttattatatttgagcggtagagcgagattttgttttaaaaaaaaaaaaagataaaaatttggatatagtagtattggttattattattaagatgataaaatgttttttggaatgaaaaagttttatgtaaagatatattttttatttatttagtttagtttttaaaaacgttaggaaagagtatatattaatgaagtattttttatgggtaatattaaagttgtttattttgtaaattggaatggttttggttttaagttatagaaaatttaatttttacgttttgaaataaatgggttttatcgggtgatattattagaagtttaaaggtaagataggttttaaggttagtttaattgagaggtttgatgaggtaaataagtattttatttttttttattttagatttatgttttttattttggttttttttttacgtagggttgcgggttcgtatttgaaatattaataattattaggaatgaggttggtttggttagtttaggtttgaatcgtgtgttttatttatttttttttttttttttttttttttttttttggagacggagttttattgtattttcgtttaggttggagtgtagtggtattatttcggtttattgtaatttttgtttttcgggtttaagtgatttttttgttttagttttttaagtatttgggattataggtacgtgttattacgttaggttaatttttgtatttttagtagagatggggttttattatattggttaggttgatttcgaatttttgattttgtgatttgtttgtttcggttttttaaagtgttgggattataggcgtgagttatcgcgtttggttttgtgtgttttatttttattcggagtagagatatatttttttaaagtatataggttttgtggaaaggtgtggagaatagtaaatgataataataataataaattgtgaattattaataagaggagtgggagtggatgtttgggaggttatttttatcgttttttttttttttttttttttttttttatggtgttgaattatttatatttttattatattttttgtaatgaggatatgtgtatattaaattatatgtgtaggttaattttttcgtttaattttatatatttttatataaagtaaatatttttttatatagtaaattaatatttgagaaaggagattttataattaaatagttgttttaggttaaattagttttttagtttttatattgtttttaatgaagaagatatgttagttgaattagtttagtttattaagtgtatatttgttcgtgtgagtgtaatatggttttgaaattattttagttttaatgtttcggaaatattatttttcgtttaaaaggatatttgaagcgtttttataaattgttggtaggtatgaaaatatacggtttttttggaaaggaatttggtaatatttttttttttttttttttaattaatagagatggggtttcgttatgttgtttaggttggtttataatttttgggtttaagtgatttttttgttttttaaagtgttgggattataggtatgagttattgtatttggtcgattttggtattatttaataaaatgacgtatttattaatttttttatttagtaattttatttttaagaatttagtttgaagttatatttttaatattgtaaaaacgtgtatgtaaaaaaagtatattgtagtatggtttgtaattgtaaaattttggaaatggtttaaatgtttatatataggagagtggttgaaaataatacggtattgttataaaatggagtattatgtagttgtaataaagaatggttaagatttttatgtatttgtaaggaatgatttttaggatatagtgttaagtgaaaaaggtaaagaggaaggggtgtttatagtttgttagtttttttgtaataagggaggggaaagaaaaagatatatatgtttttgtttatttgggtaaaaagaaatataggaagaatatatgagaagtaaagaggattttttatttacggagggtagataaaaataggttggaaaaaatggaggatgaaaatagggtaaaagagatggggtgagggatatttttttatgtgtaattttttttgatagttttaatttttttttttttttttttttgagatagagttttgttttgttatttaggttggagtgtaatggtagaattttggtttattgtaatttttgtttttgggtttaagtgatttttatgttttagtttttttagtagttgggattataggtatttgttattacgtttggttaattgtatttttggtagagatggggttttattatgttggttaggttggtttggaatttatgattttaggtgatttattaatttcgttatttttaaagtgttaagattataggtatgagttattatgattggttagttttaatttttagaaatatatgatgttttattttttaaaaaagaaattattagtggtttacgtttgtaattttagtattttgggaggttgaggttggtagattatttgaggttaggagtttgagattagtttggtaaatatgataaaattttgtttttattaaaaatatagaaattaatcgggtgtggtggtgtatgattgtaatattagttattcgggaggttgagataggagaattgtttgaatagggaggtggaggttgtagtgagttgagattatgttattgtattttagtttgtataatagagtgagattttgttttaaaaaagaaaaaaataaaataaaagtaagattatgttttttgtaggaatatggacggagttggagattattatttttagtaaaaaaacgtaagaatagaaaattaaatattatatgttgttatttataattgggagttaaatgatgagaatttatgtacgaaaagaaaggaataatatatattgaggtttattttagattggagggtgggaggagggagaggagtagaaaaaataattattgggtattaggtttagtatttgggtgacgaagtaatttttataataaatttttatgatatgagtttatttgtataataaatttgtatacgtatttttgaatttaaaattaaaatgtttaaaaattgttatagtaggtcgggtatagtggtttatgtttatggcgttattatattttagtttggtgatagagtgagattgtttaaaaaaaaaaaaaaaaagaaaaaaagaaaaataaattgttatagtaatagtttggaagaggagattaagagtaattaattgatattaaaattattggataaaagtataattaaagatagattatagtttaaagtatttttttataagatatttgttaattataaagaaaagagtgattttgttatggagaaatttttttttttttaaattgagatagagtttcgttttgtcgtttaggttggagtgtagtggcgcgatgtaatttttatttttcgggtttaagaggtttttttattttagtttttcgagtagttgggataatagtcgtgtaatattacgtttggttaatttttgtatttttagtagtaattaagttttattatattgtttaggttggtttt

SEQ ID NO: 67 - DNA, 6368 bp, Artificial Sequence
  chemically treated genomic DNA (Homo sapiens)
tgtttcgttttaagtttttttagaatattgtttttggtcgtttttggtttgtaagattatgttttaatataatttataacgtaaaatttagagataaagtttattttattagaatggtttttttgttttttaagtttatttaatgttaggattttttttagttgtttagattttagttaattatttaaatatggtggggggttttggaggggtattttgttattacgttagcgtgggaatgaatttttttttttacgaggggtgttattttgatttaagtgttttaattttatttagtcggaagttatcgcgggattgttatatagtgttttagtagaggttataaagaaaggtagggaaaaatgttaaataatttagttgatattagaagggttttggaagagagaatgaaggaggggaatatagtggtttattataaaatagaatcgtaagattagtgtatgtgtatagtagggagaaagaaattgtgttttggtggaaatttttgttttattttggttatatttttttacgtgttttttacggtttatatagacgtagagtatttttgtgttattaagagttcgttatattataaatataatttttacgtgttaatttaaaagtaaattttaaaaaagatgaaggaggatgattggcggaaagtgtttaaaaagattttttatggtggcgatattggggagaggtgggtagtattggttttaattttttaggatacgtttagtgatcggtgatggtttcgtatattgtagatgttagagatatttttttagagttattcgaatttcgttttgttttcgaggttttgtggtcgtttattttttattaggtttttaattaagttttaatgaatttagttaattagtgttattttgattttttgaatttagttttaacgtttgtttagttttattattgagggaattaaacgaatttgtaatacgtgttaagtatgaaagttatattataaaaatttttttttttttttaattttttttttatcgtggtaaaatttatagaatagaaattggatatatttgttagcgtatagttagtgggattaaatgtattcggggtttttttagttggttaaggggttggtgtgaggtaaaggtattttcgattaggttatagggaattttacgggaggtttagcggatggtttggtttagggattttacgtttacgttttaatgtttgtaggagtggtttgggtaatttttgtcgtgtttgggtttatgggaaacgggtgtaaatttgcggttttttttaaattgtttagtgggcgattgcgatttcgttttcgaggtggagggtggtatagacgaagggaaacggggggtagtttggttcgtagattgggttttggtttttttttcgagtaggaggtggtttcggaatcggttattcgttcgcggtatcgacgtttttttcggttttcgggagggatttttgcggggtcgttagttttagcgttttcgcggatagtacgcgttttttttatcgagtttgcgaggaaggcgtttcgttttttattttttcgggagcgagttttagttttcgggacgtagtttatacgcgttagtttagtacgaatcggtttcgggtagggtcgtatttattttcgggattagttcgcgtttcgtatttcgtttttcggcgttcgttttggataggtgttttttgttttttcgggattttcgtatcgggatatcgcgcgtttttcgtttttttcgcgggcgtaggagtttgaggcggcggttcggggacgcggttaatttgggagagagcgggggcgggggtcggttggggaaggggtcgttcggaggcggaggggtcgtcgcgggagtttggaagttcgcggggtcgggtcggggcggcggggcgggtcggaggcgttggtcggggcgacggttatttatttttttgttcgggatttattgcggtttttttaggtcgaacgggttttcgaaggcgcggtgttcgggtattatgcgtaggtcgttcggggagcgtattagttttttggcgtcgcggcgcgcggatatttcggaggatatgacgtcgttttagtttttcggttagcggtttcgtattcggtttttcgtttagttcggggtatcgttcgtttcgtttcggttcgcgcgcggttgatagcgtcggcgtttaatcgttaagttcgttacggagcgcggattaatcggagtttgaatttcgttttatcgttgttttttttaattcgtgtaagggtatcgtttttgtaattttgaggtcgattattaatcggcggcgagggttggttcgggtacgtttcgttttttttagggagattgagattttggattggttagttagttagttacgttagcgtcgtttcgtttttgattggtgtagtttatttagggtgttaggcgtttattggaggagaaggtcgagaggagtaggacggcgggaagaggagtgcggaattcgcgggaggtgaggttcgtcgagtcgggttgcgagtcgggttgcgagtcgggcggtagcggggtcggaggtcgtgggcggtagcgggcgtgaggggtgaggtagggttaaggggcgggggcggtcgcgggtttttattgttcgagtttgtgggagtaggcgggtttggggttgtagtatttatttcgggagtttcgtcgtagttcgggtagcgtttaggtatttcgtcggggtcgggtcgcgtgcgttcggagcggggaaggcggttttcggggttttcggtgcgcgcggggaggcgttcgtttaggggaggtcgaggtgggttcggcgttgcgttttcggttttcgatgttttcgttcgttcgtttgggatcgcgttggtttcgtatcgaagtgggagaggtttgaatagttattttaatattttgatttggaaagaaaattttttaggtcgggcgcggtggtttacgtttgtaattcgagtattttgggaggtcgaggcgggcggattacgaggttaggagtttaagattagtttggttaatatggtgaaatttcgtttttattaaaaatataaaaattagttgggtgtggtggtacgtgtttgtaattttagttgtttgggaggttgaggtaggagaattgtttgaattaggattcgggaggcggaggttgtagtgagtcgagattatattattgtattttagtttgggttatagaaaaagattttattttagaaagtatataaaaaaaagaagaaaatgtttgtttattttgtttttaattttttattataaggcgtgaatttttattgttttttttgagatagtttggttttgttattcggggtggagtgtagtggcgtttttatagttaggtataatttcgattttttaggtttttaagtagttgggatcgtaagcgttattatattggttagttatttttttttttttttttttttttcggtagagagtaggttttgttgtgttgtttaggttggttttgaatttttgggtttaggcgattttggtcgttttggttttttacggtgttgggatgataggtattagtagtgttgaagtttgtgaggtggggtttttgtggttgattttgtttttttttggggttattggtagtgtaggggtttttgtgtgtggaggaaataaggagatgattaaagtatgattttacgaattatacggtttattgttaaagaagatttgttttcgggtttatagtgtttagaggggaggagaggggaggaggtgaagatatttggtagggaagtagggtttttatggatggggtgtatttacggtagggaggtgagtggtagaacggttagggttcggttgttttgttgggatggagcgggtttttggagagtgagatttggtgagagttcgaggtttgttttggtagtagtggagagcgtgagagcgggagttttttgagaagttgggatcgaggtttagtttttaggttagtagcgtatagtttgttttaaagtatttgtataatttttaagttgatgtttgtttttgtagtttagtagttagggttagtaatttatataagggagtgtttgataaggtttaagtggtatttttaaggttgcggagtttatttaagtttttatatatgtggtttgataagatattatatttttgtaggggggttaggttattttaaaatattagattatgtaagtgttgtgaattattttaaagttatatagtaggttttagggtttaaggtagaggagtgagtttatttcggaaggtttagagtagttttaggtagtaattacggtatttttagagtttggtgtgtgagtttaatagttttggtgtgatcgttcgtatttatttagtagtacgtgatattagttttttttttgaagttattgtttagttcgggtgttgtaggaagatatataggtttgttttgggttagttttttgtttgttgtgggttgttttttgtgtgtggtttttatttcggtgtagagagatgggttggttatatttttgttttttatagcggcgagaggatagaggtatgtgtcgggttgtttgtggagtttttaggttagtgtttgggatgcggtaggtgtttggtgttaaagggaaaatattttaggatatttgtgaaagtacgttaggtagagattaggtttttatttagaatttttgagagatgtgggaattattatattgcggttttgtagtgggagagaggttgggtttagttttgaataggttatgggttggtggcggtttatagttttagagttgggtaggggtagaggatggaaggttgttaagaggaatttttaggggcgaaggggatgtaggtttaattgatttgttagattaggtcgttcgggggatagtggaagatgaggcgtttaattagttgttaagggtgatgggatacgggaggaggtcgtcgttaaatagattttgagttaggtttgttaaattaagtttttagtaggatgtgtatagagggtttaggaggagttttaggagtcggattgtcgttggttaatcggtgagtttgttattcgttagtggatattttgtttttaggtgttttggtttcggttcgcgttttgaaggcgggagacgttgtagttacgtgttggttttttcggtgtttttgttagcgtttcgttgtttgatatagtttaagttttgtatttagatttagtttgggatagtagtttttcgatagtttttaggtttagtttgtttgtgatagttacgtttgtttagggaattattttttcgtgtagatttgggttgtgttttgggtggtatttcgggtgtggggttttttattaggtgcgaggtttatattttttaggttgttttttgtttttagggtttggagagttttatgttttgaaaatgattttttttcgagtcgggtaaggtcgtattttttttggtagtgtagtgttttttttggaggtggtatttttttttgatttgttttttgtgtttgggaattttatttttttattttggttagttttgttagtagtttggagttggtttagcgttttatcgttttgttttggtttgcgttcggttttttagggtggtttttcgttagtttttgttaggtttgtttgggtaattaggtttgggtatttttttgttttttgtttagaaaatttataggttgtgggggttcgggagttaagtttggtgcgcgggtaggaaacgtattttggagtattagtttttttgttttgttcgttttacggggtgtttgggggcgtgttttagtttgttgtttttgtagtttgttttttacgtcgggtttgtttttttgagtaggttgaatatgggtatacgagtgattagcgtgatcgtgtttaggttagtgtcgtattttgtgtggtttaagggaaaattttttttaagtttacggttcgtttttttttttgttgggttacggttaagggcgttaggttttattggaggatatggattttggattcggttttcgaggttgttgttttttagtttttttatgttttggatatttttggttttattatttgggaggtcgataggggatgtagagtggtttgttggaaaggttttatgtgattttaggttgagtttttgagtagtttgttgaggtcggaggggagaagagttgagttttttttttgttgggttaggttcgggttgtggaatggttgttagttttttttttgggagaggttgggtggggtttatagtatttttttttcgttttataggaagttgttttttgttgttggttgttgggggcgattgatgtttggatttttgagtattttgttaattttagatttatttttttattttttttaga

SEQ ID NO: 68 - DNA, 6368 bp, Artificial Sequence
  chemically treated genomic DNA (Homo sapiens)
tttggaaagagtgggaaggtgagtttgggattggtagggtgtttagggatttaaatattagtcgtttttagtagttaatagtagaagatagttttttgtgggacgggaggaaggtgttgtggattttatttagttttttttaggaagggagttggtagttattttatagttcgagtttggtttagtaagggagaagtttagtttttttttttttcggttttagtaggttgtttagggatttagtttggggttatataaggtttttttaataggttattttgtattttttgtcggttttttaaatggtgagattaagagtgtttaggatatggggaaattggaaggtagtagtttcgagggtcgggtttaggatttatgttttttagtgaggtttggcgtttttggtcgtaatttagtagaggaaagggcgggtcgtggatttggagaaggtttttttttggattatatagaatgcggtattggtttggatacgattacgttggttattcgtatgtttatgtttagtttgtttagggagataggttcggcgtggagaatagattataggagtagtaggttgaggtacgtttttaggtatttcgtgaggcgggtagggtagggaagttggtgttttaggatgcgttttttgttcgcgtattaggtttggttttcgggtttttatagtttgtgggttttttgagtaagggatagggaggtgtttaggtttggttgtttaggtaggtttgataggaattggcgagaagttattttggagggtcgggcgtaggttaaggtagggcggtggggcgttgaattagttttaaattgttggtagagttggttagagtgaggaagtgaggtttttaagtatagaaggtaaattaaaaaggaatgttatttttagggaagatattatattgttaaaggagatgcggttttgttcggttcgaaaagaggttatttttagaatatgggattttttaagttttgaggataggaggtagtttggggagtatgaatttcgtatttggtaggggattttatattcgaggtattatttaaaatatagtttagatttgtacggagggatggttttttgagtaggcgtgattgttatagataggttgggtttgggggttgtcgggaggttgttgttttaggttgggtttggatataaaatttggattgtgttaagtagcgggacgttggtaggagtatcgggaaggttagtacgtggttgtaacgtttttcgtttttaggacgcgggtcgaggttaaggtatttggaagtagagtgtttattgacggataatagatttatcggttggttaacggtagttcggtttttgaggttttttttgggttttttgtgtatattttgttgagaatttggtttaataggtttggtttaaagtttgtttagcgacgattttttttcgtgttttattatttttgatagttgattaggcgttttattttttattgtttttcgggcggtttgatttggtaggttagttgaatttgtatttttttcgtttttgggggttttttttagtaattttttattttttgtttttgtttagttttggagttgtaagtcgttattagtttatggtttgtttagagttgagtttagttttttttttattgtaagatcgtagtgtggtggtttttatattttttaaaggttttgaatgaaagtttggtttttgtttaacgtgtttttatagatattttggaatattttttttttaatattaagtatttgtcgtattttagatattggtttgggagttttatagatagttcggtatatgtttttgttttttcgtcgttgtgaggggtaggggtgtgattagtttatttttttatatcggggtgaaggttatatatagggagtagtttatagtaggtaaggggttggtttaagatagatttgtatgtttttttgtagtattcgagttgagtaatgattttagggggagagttgatgttacgtgttgttaggtgagtacggacggttatattagagttgttaggtttatatattagattttggaaatgtcgtggttattgtttggagttgttttgagtttttcgaggtggatttatttttttgttttgggttttgggatttgttgtgtagttttgaagtgatttatagtatttatatagtttgatgttttggggtgatttgatttttttgtaagagtgtgatgttttattagattatatatgtgaggatttgagtgaatttcgtaattttgggaatgttatttaaattttgttagatatttttttatgtgagttattgattttgattgttggattgtaaaaatagatattagtttgaaggttgtgtagatgttttgaggtaagttatacgttgttggtttgggagttggatttcggttttagttttttagagagttttcgtttttacgttttttattgttattaaggtaaatttcgaatttttattagattttattttttaggggttcgttttattttagtagagtaatcggattttggtcgttttgttatttatttttttgtcgtgaatgtattttatttatggaggttttgtttttttgttaggtgtttttatttttttttttttttttttttttgagtattgtgaattcgagaataaattttttttgataataaatcgtgtgattcgtggaattatattttgattatttttttattttttttatatataaggatttttgtattgttaatggttttaggagagggtagagttagttatagggattttattttataggttttaatattgttgatgtttgttattttagtatcgtgggaggttaaggcggttaaggtcgtttgagtttaggagtttaagattagtttgggtaatatagtaagatttattttttatcgaaaaaaaaaaaaaaaaagaaaaatagttggttagtgtagtggcgtttgcggttttagttatttgagagtttgggaggtcgaggttgtgtttagttgtgaagacgttattgtattttatttcggatgatagagttagattgttttaaaaaaaataataaaaatttacgttttgtaataaggaattaaaggtaggatgaataaatattttttttttttttttgtgtgttttttgagatggagtttttttttgtagtttaggttggagtgtagtaatgtgatttcggtttattgtaattttcgtttttcgggttttggtttaaataatttttttgttttagttttttaagtagttgggattataggtacgtgttattatatttagttaatttttgtatttttagtagagacggggttttattatgttggttaggttggttttgaatttttgatttcgtgattcgttcgtttcggttttttaaagtgttcggattataggcgtgagttatcgcgttcggtttaaaggattttttttttaaattaaagtattaaaataattgtttagattttttttatttcgatgcgaagttagcgcggttttaggcggacgagcgaaggtatcgaaggtcgggggcgtagcgtcgggtttatttcggttttttttgagcggacgttttttcgcgcgtatcgggggtttcggagatcgtttttttcgtttcgaacgtacgcggttcggtttcggcgaggtgtttgaacgttattcgagttgcggcggggttttcggggtgagtgttgtagttttaggttcgtttgtttttataggttcgggtaatggagattcgcggtcgttttcgttttttgattttgttttattttttacgttcgttgtcgtttacgattttcgatttcgttgtcgttcggttcgtagttcggttcgtagttcggttcggcgggttttatttttcgcgggtttcgtattttttttttcgtcgttttgtttttttcggtttttttttttaataggcgtttagtattttgagtgggttatattaattagagacgaagcggcgttaacgtgattgattaattaattaatttaaagttttaatttttttgagaggggcggagcgtattcgggttagttttcgtcgtcgattggtgatcgattttagggttgtaggggcggtgtttttatacggattggagagggtagcgatggggcggagtttaagtttcgattagttcgcgtttcgtggcgggtttggcgattggacgtcggcgttgttagtcgcgcgcggatcggggcggggcgggcggtgtttcgggttgggcgaggggtcgggtgcggggtcgttggtcgagaggttgaggcggcgttatgtttttcgaggtgttcgcgcgtcgcgacgttaagaagttggtgcgtttttcgagcggtttgcgtatggtgttcgaatatcgcgttttcggaagttcgttcggtttggaggagtcgtagtgggtttcggataaggaggtgggtggtcgtcgtttcggttagcgttttcgattcgtttcgtcgtttcggttcggtttcgcgggtttttaggttttcgcgacgattttttcgttttcgggcggttttttttttagtcggttttcgttttcgtttttttttaggttggtcgcgttttcgggtcgtcgttttaggtttttacgttcgcggggagggcgggaggcgcgcggtgtttcggtgcgggggtttcgggagggtaggaggtatttgtttagggcgggcgtcgggaggcggggtgcggggcgcgggttggtttcgggggtgggtgcggttttgttcgaggtcggttcgtgttgggttagcgcgtgtggattgcgtttcgagagttggggttcgttttcgagaaagtggaaggcggagcgtttttttcgtaggttcggtggggagggcgcgtgttgttcgcggaagcgttggagttggcggtttcgtaggggtttttttcgggaatcgggggaggcgtcggtgtcgcgggcgggtggtcggtttcgaagttattttttgttcggaaggagggttaggatttagtttgcgggttaggttgtttttcgttttttttcgtttatattattttttatttcggaagcgaggtcgtagtcgtttattggatagtttgaaggagatcgtagatttgtattcgttttttatgggtttagatacggtaggagttgtttaggttatttttgtagatattggggcgtgggcgtggggtttttgagttaggttattcgttgggtttttcgtggggttttttgtgatttgatcggaggtgtttttgttttatattagttttttggttaattgggaaggtttcgagtgtatttaattttattggttgtgcgttaataggtgtgtttagtttttgttttgtggattttattacgataaaaaaaaaattgggggagaaaaagaatttttgtaatatgatttttatatttaatacgtgttatagattcgtttaatttttttagtgatagaattaagtagacgttggaattaggtttaagaagttaaagtagtattaattgattgggtttattgaagtttggttggaggtttggtggggggtgagcggttatagagtttcggggataggacggaattcgagtgattttggggaagtgtttttggtatttatagtgtacggagttattatcggttattgagcgtgttttggagagttgagattagtgttgtttatttttttttagtatcgttattatgaggagtttttttagatatttttcgttaattatttttttttattttttttaaaatttatttttaagttgatacgtgaaaattgtatttatggtgtaacgaatttttaatagtatagaaatattttacgtttgtatgaatcgtaaggagtacgtgagaaagtgtggttaagatgaggtagaggtttttattaaagtataatttttttttttttgttgtatatatgtattgattttacggttttgttttatagtgaattattgtgttttttttttttatttttttttttagagtttttttggtattagttgaattgtttagtatttttttttgtttttttttgtggtttttgttgaggtattgtgtggtagtttcgcggtgattttcgattgagtggagttgaaatatttgagttaaggtggtatttttcgtggaagagaagatttatttttacgttggcgtggtggtaggatatttttttagagttttttattatgtttggatgattaattgggatttgagtagttgagggaggttttagtattgggtgggtttgggggatagagaaattattttaataagatggattttgtttttgagttttgcgttgtgaattgtattggagtatggttttataggttagaaacgattaaagatagtgttttggaggaatttagaacggggta

SEQ ID NO: 69 - DNA, 6040 bp, Artificial Sequence
  chemically treated genomic DNA (Homo sapiens)
tggggtttaagtaattattttgttttagtttttcgagtagttgggattataggtgtacgttattaagttcggttagttttttttgtattttagtagaaatggggttttattatgtggttaggttagtttcgaatgtttgttttagttttttggaagtttttttttgtaattagtatttaaaagtttgttagagaagattagtatttatattagatttttattagtttaatgaagtggttattaaaggtgtggtttatggaatttttttatgggtttataagattagaattatttttataatattaagatatttgttttttaattgtgatgttatttttatggatgatgtaaaagtaatattagtaatagaattatttgaattgttatttttttatttatttttgatataaaaaatttgttttttttaatatttttgtgtaattaatggtattgttgtatagttgaaagggtatagtatttcgtgataaattggtttcgtttaaattttagttttgttatttataagtagtgtgatgttgggtaagatatttggtttttcgtatttgtttttttatatgaaaaatgtggttaataatacgattttaataaaattttgtatgtaaaataaaatatttgttagagtaggtgtttaacgaaaatagtaagtttttatttaacgttatttataggtttttggaaaatgtaattttaagttaaaagatatataataaaaaaaatttattataggcgaattgatataaataagagttaagtttcgatggtatatttttagttataaaagtattattaaatttttaaattaatattaaaatttttttaatatttaatattgaagtaaatgtgagttatatatttatttaagaaagattaataaaaataagtaagatagttggttatttgttattttagtttagtgttgacggtgtcgggagttattttagtagtttggagtataggatattattttagtgtagagtatttaaattgggagagtgtagatattttaataaatttattgtatatatttttgggatgtagaagggaattggagtattaagagaaaatttatgtagatatgggaagaatagatatgaagataacgtgtaattgggaatggagttttttttttatatacgttattgaggatttgttgtattttttttttatttaataaattatttaagttggagttgtgttttattattttttattaagtatttttaaaacgatttttttagtttttttttttttttaatttaattgtttattagagttgagatatttaattattgtatatttgaattatagtatttgtttttaagttggttttttagattttaatttttttttatttaaatatattttatgttgttattagttggttttttaaaatgtatattttttatttttttgttttaaagtttttattaagtaagtaattaaatattattaaaatataaagtttttggtatggtataaagttttttaaaatttggttttaatttttttagttttatttattattagtttattatatttgatttttttttatttttgttatattaaggttttatgtaattattgaattttatgttttttgtttttataattgttattttttttatttacgggatagagattgttgttttatttttagttaatgattttttttttaatattttttaaagtataggtgagagagaattattttttttttggggatattttttaagtagtttttagttagtattattttttttattgtgtttaatgattttttatatattttttgttataagaggagagaaaatattttatatttattttttggagatttagtttaattatgaaatgtgggtaattatttttgttttgtagagtttgtgaaaattatttagtgtattaagaaaaagatatgaaaataaatttttttagagttaattaagtaaaggttcggaattggaaatgattttaattttgtttggtttagtttaaatttatgttttttttattatatgtgttgttttgttataatatagtagataatagatggaatttatttatttaataattttttttattggattgtgaaatttttgaagatattgagtatgtttgtatttttagattttttttttttttttgagatggagtttcgtttttgttgtttaggttggagtgtaatggtataatttcgatatatcgtaatttttattttttgggtttaagtgatttttttgttttagttttttaagtagttgggattataggtatgtgttattacgttcggttaattttttatttttagtagagatggggtttttttatattggttaggttggtttttaattttcgattttagttgatttatttattttggttttttaaagtgttgagattataggtttagatttttaatggagtaataattttagttggtattgtgattgtagagattaaaatatttagtttttaagaattttgtttagagagggagaaatgtaggtaatattttattgttgttttttgtgaaaagggttatgttagagggatattggaagtatatatatgaattaggaatatttttatagatatttaaagagagtagaagaaaatagaaggggttaagggaggttttttggaaagagatgagatatgagagaaatgttgaaggatgttaggtgttggggggaataaggtattttgaaattttttaaaagtattaatttataagtgttataattattgtttatgttgatagttgtaaattattattgttgataaatattttatttttgaaatgttttttaaaaagatttttggttggggacggtggtttacgtttgtaattttagtattttgggaggttgaggtgggaggattacgaggttaagagatcgagattattttggttaatatggtgaaatttcgtttttattaaaaatataaaaattagttaggcgtggttgtgtacgtttgtagttttagttattcgggaggttgaggtaggagaattgtttgaatttaggaagtagaggttgtagtgagttgagattatgttattgtattttagtttgggtaatagagggagattttattttaaaaaaaaaaaaaattattaaaatatagtaatttaggtttattaagttattattattgggttattttataaataaattaagtttagatgcgaatttaaagatattgagatattaatttattttttaagttgttaagttagtttttttgaaattttatttcgtagttttgtaaataatgtatttttgatattttaagtttataggaataaaaaattatttgttagttgttttcgttttttatttatgtttaatttatgtatttatatttataagaaataaattattaagttttattttatttttagttatgttgtgtttttatcgataatagtatgaagatttcggggatttggatattaaaataagtttgagtattggttttataatttattaggtgtgattcgaggtaagttagtttttttatgttttattttttttatttgtaaatatttatttagaagttgttgtgaatttgatatttttatgtttataaattgattttttgaaaagagtttggtatataggacgtgataataaatgaaagtatttgttatttttggaaaaataagtatgataagatagtttatatattgttgattttaagtatagtatatgtattttatttttagttagtttgatagtgagataataaaaagagttatttttgatttgtattacgagtagaagaatttaattttagtttttagaaagatgtataagaattaagagtggtagtttttttagttttaattgttatttttttattaggtggtaaattcgtttagagaagaaaatgaattattgttatatgggattttgtagtaatttttgtgaatataggtttataattttttattatggagatttaagttttttggagttatagttgtttttgggtttatttgtaggtatgtattttttgtttagaaatatatataatatttggtatatggatttggaggtaaaagaggaggaaggtttgaggttagatattattttaataagtatattaagtttttagaagggtaatttatttttgtagagaatttttaattattaaaatttatagtttgtaaagtagtatttttaaagttaagagaagaaggtggaagggttttgagaggttattgattaaatagatgaaaatgaaggtatggagtttggtgttaaaagaaattttttttaaaaattaaataataatattagagtaaagtttttagggcgagataaggagttgtaataaaataagcggaaattcgagaagcgttaatgttttaaagggttaatgattatatataatttacgtagttaacgtgttaaaatatattaacgtattttttttttttaaataaagtaggaaagcggattttgtatgaggggcgggttgtcgatttagtagtttttttcggatagttcgttttgattttttttggttggtcgtggagggattatatggttttaaggttttttagtttcgggtttatatatttcgggttgtcgtataaattttagttttagtttagatttataattttttttcgaagattaatcgcgatttgggagttttattttttattatagcgaggtcggcgatgtcgtagttatattattttttcggggtttaggcggaagaggttgtatgtttcgtttgtttttttcgttttttttagtcgttcggttgggtttgttacggtatcgtttattaagacgggcggttaagatattaggataggtttttttttatcggaaaaggcgggatttagattacgtttcgtaggtcggcggaagtagttgatatttttattggttgtaaaattttgatttgtgaaagcgggcgttttggaagatatcggaagtagagttacggagaggtaggattcggaagtggggttgtttttttaaataataaaaatttgaggttttgttttttttatttttttgttttttttttaaaaaagttttttgttatttatttttagaattttataatgcgagaattttttttaatttgtgagttttcgcgatttttttttgtgggtttttggggatgttagggttttcggtattatttttagggtgcgatttgtttattttttttttagttttttcgtttgtatttgagggatttttgggaatgcgaagtatttttgaaatgttttgtgttggttgtgggattgggaggacggttgaatttagagggtagtgttgagtaggttgtttgagtatttttttagtattggtttgtttttttaatttttagatattggtaaattgtgggttttaattaggtatcgaggttgaaacgtattaggtaatttgaggttaggaaagaattttttgtggtaattaatgggaaggaattgtcgtttgcggattgtagcgattgattaggtattttaaagagattaattggtaagataaatgataaggtaatttttaattagtagtagtatttagttttttttgattttaattattttattaggtgaggttttattatatatatacgtttttttttttgtattttatcgatggagaaataggcgttttgatatgtttgaatttgcgtagtttttggaattttaataaagtattagaaatgagagttttttattttttgtttttttatggtaagtttttggttttaaatgtgtggtgtatttttttttaggtaggagagagttttttttagaatgtttttaattttttatggatttagaaggtggatagagagaaagagagaaggtaatttacgtgagattttggtttatgaattgtattcggtttatgagatttttttgtatttagggtaatataatgattagaagatttgggattttgttatttgtgtttatattgtttattagggtatataaaggttttgttttaaattataattaatttgatatttgagtttg

SEQ ID NO: 70 - DNA, 6040 bp, Artificial Sequence
  chemically treated genomic DNA (Homo sapiens)
tagatttaaatattaagttagttatagtttaaaataaaatttttgtgtgttttagtgaataatgtaaatataaatagtagaattttaaattttttaattattgtgttgttttaaatataaaagggttttataggtcgaatatagtttataaattaaaattttacgtgagttattttttttttttttttttatttattttttaagtttataaaaaattgaaaatattttgaaaagaatttttttttgtttgagaaaaaatatattatatatttagaattaaaagtttgttataagggggtaaagagtgaaaaatttttatttttaatattttattagaattttaagaattacgtaaatttaaatatgttaaagcgtttgtttttttatcgataaaatgtagaaagaaaaacgtgtgtgtgtagtagaattttatttaatgggataattaaaattagaaaaagttaaatattattattgattaaaagttgttttgttatttgttttgttagttgatttttttaaagtatttaattaatcgttgtagttcgtaaacggtagtttttttttattggttattatagaaagtttttttttgattttaaattgtttagtacgttttagtttcgatgtttggttggaatttatagtttattaatatttggggattgaaaggataggttagtgttggggaaatgtttaaatagtttatttaatattattttttggatttaatcgtttttttaattttataattaatatagagtattttaaaagtgtttcgtatttttaagaattttttagatgtaaacggagaaattgaaaagggggtgaataggtcgtattttgaggataatgtcgagaattttagtatttttaaaagtttataagaggaagtcgcgggagtttataaattgagggggattttcgtattgtggagttttaggggtaagtagtagggaatttttttaaaaagaaagtaaaaagataaaaagaatagaattttagatttttgttatttaaagaggtagttttattttcggattttattttttcgtgattttattttcggtattttttaaaacgttcgtttttatagattaaggttttgtaattaatgagagtattagttattttcgtcggtttgcgggacgtgatttaaatttcgtttttttcggtggagaggagtttattttagtgttttaatcgttcgttttggtaggcggtgtcgtgataagtttaatcggacggttggagagggcgagaagggtagacgggatatgtagtttttttcgtttgagtttcggaagggtgatgtggttgcggtatcgtcggtttcgttatggtaagaagtggggtttttaggtcgcggttgattttcgagaaggggttgtggatttagattagggttggagtttgtgcggtagttcggggtgtgtgggttcggagttgagaggttttggagttatgtggtttttttacggttaattagagagaattaggacggattgttcgaggaagattgttgggtcggtagttcgttttttatgtaaagttcgtttttttattttgtttaggaaaaaaaaatgcgttggtgtgttttaatacgttggttacgtagattatgtgtggttattgattttttgaagtattagcgtttttcgagttttcgtttgttttgttgtaattttttatttcgttttaggggttttattttggtgttattgtttgatttttggggggagttttttttggtattaaattttatatttttatttttatttgtttagttagtagttttttaagatttttttattttttttttttaattttgaaaatgttgttttataagttataggttttaatagttaagagttttttgtaaaggtggattgtttttttaggagtttaatgtatttattggagtggtgtttagttttaggtttttttttttttttatttttaggtttatgtgttaaatgttatgtatatttttggataaaggatgtatgtttgtaaatagatttaaaaataattatgattttaaaaagtttgagtttttatggtgaaaaattatgagtttatgtttatagaagttgttgtagaattttatatagtaataatttatttttttttttggacgaatttattatttggtgggaagatggtagttgagattaggaagattgttatttttaatttttatatatttttttagaaattgaagttgaatttttttattcgtagtgtaagttaaagataattttttttattattttattgttagattagttaaaaataagatgtatatattgtgtttaagattaatagtatataaattattttgttatgtttgtttttttaaaagtagtaaatgtttttatttattattacgttttatgtattaggttttttttaaaaaattagtttataagtatggaaatattaagtttatagtaatttttgaatagatgtttataagtgaaagaagtgaaatatgaagagattgatttgtttcggattatatttagtagattgtaaagttagtatttaaatttattttaatgtttaggttttcgaaatttttatgttgttatcgatagaaatataatataattaaggatgaaataagatttagtgatttgttttttataaatataagtatataaattagatataggtggaaaacggaaataattggtaggtggttttttatttttgtgagtttgggatgttaaaagtatattgtttgtagagttacgaagtgaggttttaagaaggttaatttagtagtttaagaaatggattagtgttttagtatttttgagttcgtatttaaatttagtttatttgtgaggtaatttaatggtaatgatttaataaatttgaattattgtattttaatgattttttttttttttgagatggagtttttttttgttgtttaggttggagtgtagtggtataattttagtttattgtaatttttgttttttgggtttaagtaatttttttgttttagtttttcgagtagttgggattataggcgtgtataattacgtttggttaatttttgtatttttagtagagacgaggttttattatgttggttaagatggtttcgattttttgatttcgtgatttttttattttagttttttaaagtgttgggattataggcgtgagttatcgtttttagttaagaatttttttaaaaagtattttaaggataaaatgtttattagtagtaataatttataattgttagtatgaatagtaattgtagtatttgtgaattaatatttttaaagaattttagaatgttttgttttttttaatatttaatattttttaatattttttttatgttttatttttttttaaaaagttttttttaattttttttatttttttttattttttttaggtatttatagggatatttttagtttatatgtatatttttagtatttttttagtataattttttttatagaaaatagtaataaggtgttgtttgtatttttttttttttaggtagaatttttaaagattaggtattttaatttttatagttatagtgttagttggagttattattttattaagagtttgggtttgtaattttagtattttgggaggttaaggtgggtagattaattgaggtcgggagttggagattagtttgattagtgtggagaaattttatttttattaaaaataaaaaattagtcgggcgtggtggtatatgtttgtaattttagttatttgggaggttgaggtaggagaattatttgaatttaggaggtggaggttgcggtgtgtcgagattgtgttattgtattttagtttggataataagagcgaaattttattttaaaaaaaaaaaaagagtttggggatataaatatgtttagtgtttttaaggattttatagtttagtgggggaaattattaaataagtaaattttatttgttgtttgttatgttgtagtaagataatatatgtagtagagagagtatgggtttagattgagttaaatagagttagaattatttttagtttcgaatttttatttggttaattttaagggagtttatttttatgttttttttttggtgtattaaatgatttttataaattttgtaaagtaggaatgattgtttatattttataattaaattgagtttttagagaatagatgtgaagtattttttttttttttatagtagaagatatgtagaaaattattaaatatagtggaaggagtagtattggttgggaattgtttgagagatgtttttaagaaagaagtaatttttttttatttgtattttaaagagtattagggaaggagttattagttagaggtgggatagtaatttttatttcgtagataaaggaaatggtagttatgggaataaaaggtatgaagtttaatagttgtatggagttttaatgtggtaggaataaaaagaagttaagtatagtggattggtgatagatgaggttagaaagattggggttagattttgaagagttttgtgttatgttaaagattttatattttgatgatgtttaattgtttatttgataaaggttttggagtagggaaataaaaggtgtgtattttagaaaattaattggtaataatatagagtatatttaaatggaggaagattagaatttgggagattagtttgaaaataagtgttgtagtttaggtatataatgattgaatgttttaattttgatgagtagttgggttgaaaggaaaggaaaattaggaaaatcgttttgaagatatttaatgaagggtgatgaagtatagttttagtttggatgatttattggatgggaaagaaatatagtagatttttaataacgtgtatgaggaagaaattttatttttaattgtacgttgtttttatgtttgttttttttatgtttgtatggatttttttttggtattttagtttttttttatattttagagatatatataatgggtttgttgaggtgtttatatttttttagtttgagtgttttgtattggaatgatgttttatattttaggttattgggatggttttcggtatcgttaatattgaattgaaatagtaaatagttagttattttatttgtttttattaattttttttaagtggatgtataatttatatttattttagtgttgaatattagaagggttttgatattgatttggaagtttggtgatgtttttgtgattagaaatatgttatcggaatttaatttttgtttatattaattcgtttatggtaaattttttttgttatatattttttggtttaaagttgtattttttaaggatttgtggatgacgttaagtgagggtttattgttttcgttaagtatttattttgataggtgttttattttatatataaggttttattaaagtcgtattattggttatattttttatatgaagaaatagatgcggagagttaagtgttttgtttaatattatattgtttataaatagtagagttaagatttaaacggaattaatttgttacgaaatgttgtgtttttttaattatgtaataatattattaattgtataaaaatattaagaaaagtaaattttttatgttaggagtgggtgaggaggtagtagtttagataattttgttgttaatattgtttttgtattatttatgaaaatggtattatagttaaaaggtaagtattttagtattataaaaatagttttgattttatgaatttatgaaagggttttatgaattatatttttgataattattttattaggttaataggaatttgatgtgggtgttgattttttttagtaagtttttgaatattgattgtaaagaaaaatttttaggaggttgaggtaggtattcgagattagtttgattatatggtgaaattttatttttattaaaatataaaaaaaattagtcgggtttggtggcgtgtatttgtagttttagttgttcgggaggttgaggtaggataattgtttgaatttta

SEQ ID NO: 71 - DNA, 8607 bp, Artificial Sequence
  chemically treated genomic DNA (Homo sapiens)
gaaggatggtttgagttcgggaggtggaggttgtaatgagttaagatagcgttattatattttagtttgggtgatagagtgagatttttttttaaaataaaagtaaaattaaataaattttattaaaatagttatttaatttttttgtttatagttttgtaatttgtgtagagtttggtggagattattagtttgtttaatgtttttagtgttgagatagttttttaaggaggattttttttttagatagttttatttgcgtggttgttaagttggtgttgggtgatatttaggttattgttggggttgttggtgtttagtgtttgtattagtttatttgggttattataatagatttgggttgttataatagataatattatagattaggtagtttaaatgatagaaattagtttttttatagttttagaggttggagggatttttttttgggttgtaagtggttgtttttttattttgtgtttatatgatttttttgtgtgagtggggagagagggagagagggagagatggggagggagggagggggagagagagagagagcgagcgagttttttagcgtttttttgttttttgtttttttttatagaagtattaattttattaggagggttatttttatgattttatttaaatttgattattttttaaaggttttatttttaaatattattatattgggggttagaattttaatatatgaattttggggagatatatttagtttataatagggtttttttatgtggttatgttgggtttttatagtatggtagtttttatatatggtatttgggtttattagggtgtaaaagataaatttgttaggtattttaaaggttttagtttagaattatttattgttttgtaaatgtttatatattttattggttatagtaggttatgaggtttgtttagatttacggggaaggaattatataagggtgtgaatgttgagaggtatggtttatacgtattattaaaatgatattttgttatttttttttttttattttatttattttttttatatgttatagtggtttttatatatttttttttaatttttttttttgttttttaatatatatattattattattattagttatagtttattaattttttgtttttttttatttttaattttgtattatttaaatttaaaaggattttgtattgatagaaatagaacgaataaagttagaatttttttgttgtggaggaggaagggagtagttatatatgttgttatattattaataatgtttattttttgatttttgattaatgaaggttttttgttaggggaagtaatgtttaaagtttatatttttttttagcgttatagatgtttagttgtatagaggtggttggttttaaagatttttataaaaatagttgagatgtaaataagtatagttattagaattttttttattttttttaagaaatagatttgtattgaagggtgtatggaagatagagagtggggatagggagaaggagaagaagggggaggaggaggagtaggaggaagaggaaggggaaaagtaagagggagggagggaaggaggaagggagagagagagagaaaggaagaggaaaaatagagattatatataagataaaaatatggatataaagtatgtaaattttttttattgtattgagtttttagtaattttttttattagttttattaaaaatattttttaggttgagcgcggtggattatatttgtaattttagtattttgggaggttgaggtgggcggattatttgaggttaggagttcgagattagtttggttaatatggtaaaatttcgtttttattaaaaatataaaaattagtcggtatagtggtgggtgtttataattttagttatttggtaggttgacgtaggaaaatcgtttgagtttggtggcgggtgggagcggcggaggtttgtagtgagtcgagatcgtgttattgtattttagtttgggcgtagagtgagattgtttttaaaaaaaaagagggtattagggtatattatttttatatgttgataagttgttatataagttttattaatttataatttaatattatatattttatttatttaaatttttagttttttaaagtatattaataaagttattaggaaaatgggattagtataattaaagatgttatagattgtatataattttgatacggatagtaacgtgattaaggagtggttttttttaggaaataattttattaaaaaaatttatgaaaataaaagtaatttaaaatttttaagatatattaaatgtatgattgtggttttatattgttatttagtatgcgttgtattgtaggaaataaaatattttttttttagggaatgttaaattgatttcgaagatagtgaaagttttttattatttattattttagtgttttttggttgtattaaataataaataagtgaattattttattttttaaaagttatattttaaaaatgggataaagtgggatttttttttttttaaaaatgttttagttaggtataggtttacgtttgtaattttagtattttgggaggttaaggtgggcggattatttgaggtcgggagttcgagattagtttgattaagatggagaaattttatttttattaaaaatataaaattagttgggtgtggtggtatatgtttgtaattttagttatttgggaggttgaagtaggagaatcgtttgaattcggtaggcggaggttgtcgtaagtagaattcgcgttattatattttagtttgggtaataagagggaaattttgttttaaaaaaaaaaaaaaaaaaaaagtttttatagttattaaaaaatttgtatttaaaaatagttgataaaaatattttttattaaaatagttgataaaaatatttttttgaggttaagtgtagttgtttatatttgttattttagtattttgggaggttgaagcgggaggatcgtttgattttaggagtttaagattaggttgggtaatataggaagatttcgtttttatatatatatagaaattttataaaaattagttgggtttggtggtatatatttgtggttttagttatttgggaggttgaggtaagtgaatcgtttgagtttaggggttttagggtgtagagagttatgattgtgttattggattttagtttcggtcgagcgatattttgtttgtttttttttttttttttttttttttagttttggatcgtataagaagggagataaggattattgataagatatggtatgtgatattaattagatttggtttttttttgttttgttttattagaggttggattttttttgttttagttttttcgttttttatagataaattttttgtttttcggatagttatttggtttgtttgttttttgtttttatttttttttgtttgtttttttgtttgaaaatttatgttgttttgttgttttcgttgggtttcgtttttatttttgttggaggagatttagttgataattttatagatttttttcgttttttttgtcgagttgattttttttttggaaattttattcgtagggaagggttagtgttcgtgtttgtttgtttgtttgttgtagttcgcgtaaagttgagcggttagggcgttgttgtttttttaaagtattattaaaaataatattttagtttttaagtaattttttgagtttgaattaaaagttggaagaattttttgggttttatgagtatttttgaatatgtttgattttatattttagaggttttaatatatttataattttggtttatagattttttatatttttttagttttaatttttgttttttttagaaataatttttaagtaggagagaatattgattggatttgatttttttagtttgggtagaggtttgtagatattttgtaggttgttagatttttcgtttagttatttgttagttgggggttatatggtatagaaagtagttatttttatgtaaggtattgtttgggtttgttttttttaaaggggtaggggatgcgggttggataaagggttcgtgattaagtaaagtattgtgatgatagttgttatttttatatttttttagatttgttttttaaattaaattttgattttttttttttaagttggagttattgttaattattgggagagttttagtagataaagttttatgtttttaggcgtttgtgtattttattttttttgtagagtagaattttttttttatttttgtgtttttggggacgttttattttttttttttagttggttttaaggttattatatcggtgaagtgttttattattattttttagaagaaattgagttttttagagaagttaagtgattttttgtatttatatttatatttaagaaaatttaattttataataattaaaaataaaaagtagaaaaaaatttataagtgatgagaaaaaaaaaaattaaaagttataaaaaataaatgaaaaaatgaaattaaaggaaaaaagattttttaaaaaagtaaaaaaaagaaaagaaatttaattttagagttttgatataaaatgttttaggtgttatttttaatgagagaaaagggacgtgaatttttaagtgattaagtgaatttttaagtaaatttgtcgtattagcgttttaggcggtttaaatattatacgttttcgattacggcggaatggagagaatgtgcgtatgttcggcgggaatttgcgtatgttcggagagaatttgcgtatgttcggtcggaatttgcgcgagttcggcgggaatttgcgtaagttcggcgggaatttgcgtatgtttagagtttcggggtacggttttttcgttttttttaggtttagtaggaaacgaagcggtttttttcgttatttgtcgtttgtttatcggaagcgagttgcgatacggtaggttttcgttcggaagaagcgattaaagcgtttgaggatcggtaatatggtgcggtcggggaataaggtataaagaaagttatggatttgggttttattcggattggggattcggagagggtggttcggaagtaggaatcgtgggatcgcggttaagataaagaatggggtaagagaagattatggtggtgggtttagttaggagggtcgggatcgagggatgcgttatgagaaaagttggagatttggggttttaagatttgaatttgagtttcgttgattttattttttttattatttatttattttattttttttttttttttttatttgttttttgttttatttgtttttttattcgttttttttttttttttttttattttattttattttttagttttattttttttattattttcgagtttgggtttttaagatttttatgagaatgaaaattagttgtgataaagtaattattttatagggtttgttgtaaaatttaagagagggattatttgtgattaaaataatttaaattgtaaagcgtcgtattattagttttataataacgtagtatttcgtatttattgaaagtttattttgtgagggacggatttaaattttttatttttattttatttaatttttataattttttgaagtgaaaattatttatttttattttgtaagtgggaaaatcgaggaataaagaattgtgggttttttttggtgaaattcggatttgaatttaagttgtttggttttagggttttggagaatttttgtgttgttagaaatttatgattattggtgttttagattagtaatagaaattataatgaattttaaagtgattttttttttttaatataaaagagtggtagttgtttttgaagggttattagagggagatgtggttttagggattaatgaatttatttaatatagataaataagatacgagtttgagtaattgatttttagtttttttaattttttattgagaaatgttgattaaaacgattatgaatttttaataatgttatttatttttttttttcgtttttttttagttgttgaaaattttgtagttttagtggaggagttgtttgttgtagatgaattggaagtaaaattttaatagtttgtattgtttcggtatagaaatgaagagttgttatgttatttagttttttttttttagtttttttattgttgttagataggaatttagaaatatagattattttgtttttagataataagttttatatttgaaattttttgatggtatttattggatatttaatttatgataaaagtgttttagttttttagagttttttggtttaaaagtagtttttgtgggtgtgtattaaataagtgtagtagtatattttgtgatttttaagtttttttaggttattatgttttaggtattgaaattgggatgtgtattttattgtttttaaaggaattttgtggtttattagtacgtttttttttttaaataatttaattttattttagaaattttttagtgtattgtgttgtttgtaaattagtgaaaaataattttttttttttatgtgttgtttgagatataattatatttagaaattatttataatttttttgataggaatttatttaggtttttaaaatatttttagggttaagagattatttaaaaaagagtagtttttttattgattatttttaaatgttattttttatttttcgtatggagtcgtattagtttttttgtaatttttatttgttgatttcgttgttttttttggtagattaatttttttatataatagttgttaaatatttggggggaggttagatacggtggtttatatttgtaattttagtattttgggaggcggaggtgggaggattgtttaagttaaggagtttgagattagtttgggtaatatagtgagattttaattttataaaaaaaatttaagaattagttgggtatggtggggtgtaattgtggttttagttatttggaaggttgaggtagcgggattatttgagttcgggagatggaggtagtagtgagttatgattatgttattgtattttagtttgggtgatagtgagattatgttttaaaaaaaaggaaaaaaaaatggtggggaggaaaattgttatgttttttttaatttttttatttgatttaaatatttagttatttttaattgttttttatattatgtattttttagatttttttttaagttgtttattttatgtttatttgtaattaatttttttggtaagatgttagtttagaattgtttatagtttgtttgatcggtataaagtattgcgagattattagttagagttaaggaatgtgaattttagaaaggattttaaattttatttagtttaatagttttttattttttagtattattaatagtgagattaagtgatatttttaaggatttagaattaatgggtaggagagatgggattagattttaggtttttcgattgttattatttttttttattagaagattttttttttttttttttgaatttattatattgttgatatagattaatatatttaggcgatgaagtaagataggtgtggggaatgtggtgtaaaagatattttacgttgttgattgattttataatttatattgaaattgtgagttgttattaatttaggttttttttagtttgtgtttaggtaaaatttggaagttaggtataaataattttatatgtattttttttaggttatgttttttttatttttttagttttttatatacgtgattgttatgtaatggtttgtgttttagtttatgtgatttcgtttgttatttatttgtttatatgattgatttttatttattaagatttatttaaggaagtttatatttaggaagttttttttgtttttttatcgttttggtattttttttattagttttgagtggatgttttttttgtgttttttagtgtttagtgtatatttttattatggaatattgttttggtattatttgttatttgtttgtgttttttattagaatagatttggtgtttttattttagattattagtttataaattgatttaaattgttagggtatattttttagtatatatatagattttagtagttattttttgtgataaaaatgttttataataaattatgttttaaattagtgatttatagtgaaagtatttgtttttatgtttgtaggtttgtaggttagttgtagtttgtttgatgtatattgggtataaatgggtttaattttggtttgtaggttggtattatatgtatttattatgggtttattttggggtttaggttaaagaagtggtagttatttggagtatgttttttttttggtagaaatttttgtagtttttagaaagtattaggattatttaagggttttttatagtgaaaatttatatgttttatatatatttttatgtagaatatattttttttttatattttttttaaatattgatataggtttatgaatataataagtaagggatatttttatagtttttttttacgatttatttttttaaatattttttggaattttgtttttagg

SEQ ID NO: 72 - DNA, 8607 bp, Artificial Sequence
  chemically treated genomic DNA (Homo sapiens)
tttggaaataaagttttaaagagtgtttgagaaaataagtcgtaagaaaagattgtaagaatgttttttgtttattgtatttatgaatttgtattagtatttaggaaaggtgtgaaaaagggatgtgttttatataagaatgtgtgtaagatatataaatttttattatggaaaatttttaaatagttttgatattttttaaaagttatagaagtttttattaggagaggaatatgttttagatagttgttatttttttggtttaagttttagaataaatttatgatgagtatatatgatgttaatttgtaggttagagttaaatttatttatgtttaatatatattagataaattgtagttgatttgtagatttataaatatgagaatagatgtttttattgtaagttattgatttggggtataatttgttatgaagtatttttgttataagaagtgattgttagaatttatatatatgttaagaggtatattttgataatttgagttagtttgtaaattgatgatttaaaataaagatattaaatttattttagtagaggatatagatagataataaataatattagaataatgttttatgatagaagtatgtattgggtattgagagatataggaggagtatttatttaagattggtggaggggatattagagcggtgaaggggtagaaaaggttttttgaatgtggatttttttgggtgagttttaatgagtaggagttaattatgtgaataagtaagtgatagacggaattatataagttaaggtataagttattatatagtaattacgtatgtaggagattaagaaaataagagaaatataatttaaaaggaatatatgtaaagttatttatatttggtttttaaattttatttgaatataagttggaagagatttggattgatggtaatttataattttagtgtgaattataaaattaattaataacgtgaaatgttttttgtattatattttttatatttattttattttatcgtttaaatatgttggtttgtattaatagtgtagtgaatttaagaagagaaaagaagggttttttggtgaaaaaagataatagtaatcgggagatttgggatttagttttattttttttatttattagttttgagtttttgggaatgttatttaattttattgttaataatattaaaaggtaggaaattgttggattagatgaggtttaaggttttttttggagtttatattttttgattttgattgatagtttcgtagtgttttgtatcgattaaataaattgtgagtagttttgggttaatattttattaggaaaattaattataaatgaatatgaaatgagtagtttagggaagaatttgaagaatatatgatgtaaagaatagttggaaataattagatatttaagttagatgagaagattaaagggaatataatagtttttttttttattatttttttttttttttttttgagatatggttttattgttatttaggttggagtatagtggtatgattatggtttattattgtttttatttttcgggtttaagtgatttcgttattttagttttttaaatagttgggattatagttgtattttattatgtttagttaatttttaaattttttttgtagagttggggttttattgtgttgtttaggttggttttaaattttttggtttaagtaatttttttattttcgttttttaaagtgttaggattataggtataggttatcgtgtttggtttttttttagatatttgataattgttgtataaaaggattggtttgttaagaaagataacgggattaatagatggaagttatagggagattgatgcgattttatacgagggataaaaaataatatttagaagtgattaataaagaaattatttttttttaagtgattttttgattttagaaatgttttaaaaatttgaatgaatttttattagggaagttatagatgatttttaaatgtggttatattttaggtaatatatgaaaagaaaagattattttttattagtttataaataatataatgtattaagagatttttgaagtaaaattagattatttgaaaaaaaaaacgtgttaataaattataaaatttttttgagaatagtaaaatgtatattttagttttaatgtttggggtatgataatttaaaaaaatttaagagttataaaatatgttgttgtatttatttgatatatatttataaaagttatttttaaattagaaaattttagaggattaaagtatttttgttatgaattaggtatttagtaagtgttattaaagggttttaaatatggaatttattgtttggaagtagaatggtttatatttttgagtttttatttggtagtagtaagaaaattgagaaagagaaattgggtagtatagtaattttttatttttatatcgaagtaatataggttgttagaattttatttttagtttatttgtaataaatagtttttttattagagttataaagtttttagtagttgaaagaggacgaaaaaaggaggtgagtggtattattaaaagtttatgatcgttttaattaatattttttaatgaggagttgagggaattagggattagttgtttaaattcgtattttgtttatttgtattgaataaatttattaatttttggaattatatttttttttagtgattttttagagataattattatttttttatgttgaaaaaaaaaaattattttaaaatttattgtaatttttgttattgatttgggatattaatggttatagatttttagtaatataggggttttttagggttttgaaattagatagtttggatttaaattcggattttattaggaaaagtttatagttttttatttttcggtttttttatttgtaaaatggggataaatagtttttattttaaggggttgtgaagattaaatgagataagaataaaaggtttagattcgttttttatagagtgggtttttaataaatgcgggatattacgttattataaagttaataatacgacgttttatagtttaagttattttagttatagatagttttttttttaagttttataataagttttgtgggatagttgttttattatagttaatttttatttttatagagattttaagaatttaggttcggaagtaatagaggaagtggggttagggagtggaatgggataaagagagagagaggggaggcgggtggggaggtaggtgagataaagagtaggtagagagggagaagagggatgggatgggtgggtaatggaagaggtggagttagcgaggtttaaatttaggttttggagttttaaatttttagttttttttatagcgtatttttcggtttcggtttttttgattgagtttattattatgatttttttttgttttattttttgttttgatcgcgattttacgatttttgttttcgaattatttttttcggatttttagttcgggtaaagtttaagtttatggttttttttatattttatttttcgatcgtattatgttgtcggtttttaggcgttttggtcgtttttttcgggcgggaatttgtcgtgtcgtaattcgttttcggtggataagcggtagatagcggaaagagtcgtttcgttttttgttaggtttgaaaggggcggggaaatcgtgtttcggaattttgagtatgcgtagattttcgtcgagtttgcgtagattttcgtcgagttcgcgtagatttcggtcgagtatgcgtagatttttttcgagtatgcgtagattttcgtcgagtatgcgtatattttttttatttcgtcgtagtcgggagcgtgtggtgtttgagtcgtttgaaacgttagtacgatagatttatttaaagatttatttaattatttaaagatttacgtttttttttttttattgagaataatatttaaggtattttgtgttagagttttggagttagatttttttttttttttttatttttttaaaaaatttttttttttttaattttatttttttatttattttttataatttttgattttttttttttttattatttgtgggtttttttttattttttatttttggttattgtggagttagatttttttgagtatgagtatgaatgtagaaagttatttaatttttttaaaagatttagttttttttaaaaagtgataatgaaatattttatcgatgtgataattttagagttaattggggaagaagagtaggacgtttttaggagtataaaagtagaagggagattttattttgtagagaaaatgggatgtataaacgtttggaggtatgagattttatttgttaaggtttttttagtagttagtagtggttttagtttggaagggaggagttaaggtttaatttagaagataagtttagggagatatagaaatagtagttgttattatagtgttttatttgattacgagttttttgtttagttcgtattttttatttttttgagggaggtaggtttaagtagtattttgtatagaaatgattgttttttatattatatgatttttagttgataggtggttggacgaagggtttggtaatttgtaaagtgtttgtaaatttttgtttaaattgagaaaattaagtttaattaatatttttttttgtttgaaaattgtttttgggaaaagtaagaattgaagttgaaaagatgtggagaatttatgagttaaaattataaatatattgaagtttttagaatgtagagttagatatatttagaggtgtttatagagtttaggaggtttttttagtttttgatttaaatttaaggagttatttaaaagttgaaatattatttttaataatattttaaaggaatagtagcgttttggtcgtttagttttgcgcgggttgtagtaggtaggtaggtaggtacggatattagtttttttttgcgggtaagatttttaagagaaagattagttcggtagaaggggcggggaagatttgtgaggttgttagttaaattttttttagtaaaggtggaaacgaagtttagcggaggtagtaggatagtataaatttttagataaagaagtaaataaggaaaaatgggagtaaagggtaaataggttaagtggttattcgggaaataaaagatttatttgtggaaagcggagaaattgaaataaggagagtttagtttttggtgaagtaggatagaaagaagttaaatttgattagtattatatattatattttgttagtggtttttgtttttttttttgtacgatttagagttagagagagagagaaaaggaaagaaatagatagggtgtcgttcggtcgaggttggagtttagtagtataattatagttttttgtattttggaatttttgggtttaagcgatttatttattttagttttttaggtagttgggattataggtgtgtgttattaagtttagttaatttttgtggggtttttgtgtgtgtgtggaggcggggtttttttatgttgtttagtttggttttgaatttttgggattaagcgattttttcgttttagttttttaaagtgttgggatgataggtgtgagtaattgtatttggttttagaggaatatttttattaattattttgataaggaatatttttattaattatttttaaatgtaagttttttagtagttgtagaaattttttttttttttttttttttgagatagagttttttttttgttgtttaggttggagtgtagtggcgcgaattttgtttacggtaattttcgtttgtcgggtttaagcgatttttttgttttagttttttaagtagttgggattataggtatgtgttattatatttagttaattttgtatttttagtagagatggggtttttttattttggttaggttggtttcgaattttcgattttaggtaattcgtttattttgattttttaaagtattgggattataggcgtgagtttgtgtttggttgaaatatttttaggaaggagggaattttattttattttatttttaaagtgtagtttttaaaaggtgaaataatttatttgtttgttgtttggtataattaggaaatattgaaatagtgaataatgggaggtttttattgttttcgaagttagtttaatattttttagggagagggtattttattttttatagtatagcgtatattaaatggtaatatagagttatagttatgtatttaatgtgttttgaaaattttaaattatttttatttttatgggtttttttagtagaattgttttttgaagaaaattattttttggttacgttgttattcgtgttaaaattgtgtgtagtttgtaatatttttggttgtgttagttttatttttttgataattttgttaatgtgttttgaaagattgaaaatttgagtgggtagagtatatgatattaaattgtgaattggtgggatttatgtaataatttattagtatgtggagataatgtattttgatattttttttttttttgagaatagttttattttgcgtttaggttggagtgtagtggtacgatttcggtttattataaattttcgtcgtttttattcgttattaggtttaagcgatttttttgcgttagtttattaagtagttgggattataggtatttattattgtgtcggttaatttttgtatttttagtagagacgggattttgttatgttggttaggttggtttcgaatttttgattttaggtgattcgtttattttagttttttaaagtgttgggattatagatgtgatttatcgcgtttagtttaaaaaatatttttaataagattggtaaagagaattattggagatttagtatagtgaaggaaatttgtatgttttatgtttatgtttttattttgtatatggtttttatttttttttttttttttttttttttttttttttttttttttttttttttttttttgtttttttttttttttttttttttgtttttttttttttttttttttttttttttttttgtttttattttttgttttttatatattttttagtataggtttgttttttggaagaaataaaagaggttttagtagttgtgtttgtttgtattttagttgtttttatagaagtttttagaattagttatttttgtgtagttaggtatttgtgacgttgaaaagggatatggattttaagtattgttttttttggtaaagggtttttattaattaagggttaagggataaatattattaatgatgtgatagtatatatggttatttttttttttttttataataaaaggattttggttttgttcgttttgtttttgttagtgtaaggtttttttggatttaaatgatatagaattgggaataaagggggataggaggttgatgggttatgattagtggtggtgatggtatgtgtgttgggggatagaagggggagttagagagaaatgtgtaaaagttattgtggtatatgagggaaataaatgggataggaaagggggaatggtaaaatgttattttggtgatgcgtgtgagttatgttttttagtatttatatttttatgtagtttttttttcgtgaatttggataggttttatgatttgttataattagtaaaatgtgtaggtatttatagaatagtaggtagttttgggttgaagtttttagaatatttggtagatttgttttttgtattttggtgaatttagatattatgtatgaagattgttatgttgtgaaagtttaatatagttatatgaaggagttttattatggattgagtgtgtttttttaaaatttatatgttgagattttaatttttaatgtgatgatatttggagatgaggtttttgggaggtgattagatttaggtaaagttatgagggtggtttttttgatggaattagtgtttttgtgaaaagaaataagagataaagggacgttagagagttcgttcgttttttttttttttttttttttttttttttttatttttttttttttttttttttttttatttatataaagagattatgtgaatatagagtgagaagatagttatttgtaatttaagaagagatttttttagtttttagaattgtgagaaaattaatttttgttatttaagttatttagtttatggtattatttgttatgatagtttaagtttgttatggtagtttaagtggattaatataagtattgagtattaatagttttaatagtaatttggatgttatttagtattaatttggtagttacgtaagtgaggttgtttagggagaagattttttttaggaagttattttagtattagaaatattgagtagattagtagtttttattaagttttgtataaattgtaaaattgtgagtaaaggaattgagtgattattttggtggggtttatttggttttgtttttgttttgagagaggattttattttgttatttaggttggagtgtagtagcgttattttagtttattgtaatttttatttttcgggtttaagttatttttt

SEQ ID NO: 73 - DNA, 5152 bp, Artificial Sequence
  chemically treated genomic DNA (Homo sapiens)
ataaataaatttaattaaaaaaaaggtataattaaaaattaagtaaagtttatttgaaagtttcgaaattatattttattatttaaaatggtgaaagtaaatacgtggtttataaatggttggtttttgggatgatatcgtggtgtattaaagatttagttaaaaaagtgtatgttagttttttattttaagatatattatgtatattttggatagttaattttaaagatatttatttgaattaagagtttttttaataaagtataatgtggtaatttattaaaagtttataaaaataaggtaagtatattatttaatagtagattgttttgtttaaaattgtttgtttatttgtttttataatttggttataattttattataaatgtatttgaaagaattgataatttataaaattaaggtgggggtgaaattaaattgaataatataattatatttattaaaaataattatgttagataagaaaattagattttatatattgaatgagaaatttatagggttaaaagataaaaggggtcgagaattttttaaatagtttttagttatttttagtttagcgagggtatgaattagaaaaattataataaaaataaaaatagttgtaatttttgtataattattttaaaagattatttttaatttttttatttaaaaaaatttattgagttaatttattattttgaataaggaatttagtagatggttcgtgaggtgaatttgaaagtttgaaagatatggagtaagtttttttaattaattagtaaatgtagttaatgtttattatttatttattataaataatatgtttataatatttatatatttaattttttttaaaggtattaagtttcgtgaaattaaaagtttgttttatttttaatttttaatatgaaatattaggagtttataatataaaaggtataaagaataaatttatttaaatgagtttaattaaaattttaatatatttttttattatatatagagattttgtttttttttagttttaaaatagatgtatttattatagttttttattttataaatttaaaggaagtaaagtataggaaaatgaagtagataatataaatgagaattaaagtaattatatgtgattaatattatttagattattttaaaaatatttaattaggttaataggttataaaggtttaaatatgtatttatttatagaaggaatttttaaagttttttttaggtattttatttaaggtaaattagatgttttgtttatattttgggtgaaattatttattatatttttgggtttagtatttaaaatggttttatttttgattattggaaatttttttttttttttttttttttttttttgcgatgtagtttcgtttttgttgtttaggttggagtgtaatggtacgatttcggttcgtcgtaatttttattttttaggtttaaatgatttttttgttttagttttcggagtagtcgggatattataggtttgtgttattatatttcgttaattttgtatttttagtagagatggggtttttttatgttggtttggttggttttgaatttttaattttaggtgatttgtttgttttagttttttaaagtggtgggattataggtgtgagttattttatttggttaggaattttttttgtttatagttttattgataaattataaagattaaaaatagatgttttacggataaagtatattataattaatttttttatgttaattttttataattaatttttttagttaattttatgaaaatgtagtatttatagaattaaaaatattttttttaatgattattttgatttttaattttttagttttttgattttaagattataaaatttaagttgttttttatttatattattatttttggtgatttggttttataaaattattaagggattgggtgaaaagtttaagtatattaaatttattttaaattaaattttaatgttttgaaggtttataaaagttatatttgagaagatataaaaatattataggagtgaaggtttgtattattgtagtatttataaattttaattaatatagtatttttaaattttatattatttaagattttaaatttaataatttatggttggatgaggtggtttatgtttataattttagtattttgggaggtcgaggtaggtgaattgtttgagtaatttggtaaagttttatttttattaaaaatataaaaaattagttgggtatattggcgtgtgtttgtcgttttagttattcgggaggttgaggtaggagaattgtttaaatttaggaagtagaggttgtagtgagttgagattatattattttattttagtttgggtaatagagagagatttttgtttttaaaattagttaaataaataaataaattttaataatttaaaaaaaaaaaataaaatttttgttttttattggttttagaataaatataaaaataggaagtttgtgttatttttgggtttttgtagttgttattttttttagttagatggttttttattatattttttttttattacgtttttgtttaaatattaaatattatttttttgaataggttttttcggtgtagttttagttgtttaaaatttataatttgttttattttttttgtttttatttgaaattataaattttgtttatggtttgtttttattagaatgtaagttttataatgatagggatattgttttgttgaatagtttttatagtatatagaataatgtggtattatagtagaggtttaaaaatttgtgttttaaagaaggttaatagtgaaaaaatgattttaatttttttaagttttgaaaattttgttttaaaatgtaaatttatgttttgtgtttttagaggttaaaaaaaatatttaagtgtagtattttaaataatattttgaaaatgtaatttatttagtttgtaatattttaatagttagttttatataaattatttttaatattggtaaaatattttttattatgtgggttttatatatatatatgtttaatggatttattttattttatatatgttgattgataattttttgagtatttattatggatttagtataatattagatattatagggttaaaaaatgggatataattttttttttgaggaaattttaatatgtttgtttagataaaataaatagaaatgaatgaagtattaaattgtgagagataaaaatttggaagattagttattgaagagttaataaaatgtgtttgaatagtttttataaaataatttttaaagttattgaatgatttagttttgaaataagttattgttaatattttaaaaatattttgttgtaattattttttaaaattatttcgttaattataaatagtttatttttacgatttattttagtatttagaaaaagaaaaaaaagaaaaagtaagtaaattaaaggtgattttaaagttattttaattaaattatatatgttatttagaaaataaagtgtttttatattttttagtttaaaggagattttattattaatttttaaaataagagttggaaataatcgtttaaaaattttgattttttgtaaatgtaaagaaaataagtaaaatatagtttgtaagaattagaaattatagtgtaagtagtgttttttaatatttaggtattttaggaattttttttaaaaatgggaaaatttttataaattaaagattgtgttaaaggaaattagttttaatgaaaatattttttattttttaattttaggtgttaaagaaaattgattttatgttcgtgtaataaatttgtatatatattttttgaatttaaaataagttaaaattttaaaaataaaaaataaaaaataaaaaaattttaaagtattttttaatataagtataataatagttatatgatggcgttgttattttattgttttaaatttttttttttttttttttttttttttgagatagggttttgttttttgtttaggttgaaatgtagtggcgtaattacggtttatgatagttttgaatttttgggtttaagttatttttttgtttgagatttttgagtagttgggattgtaggtaagtgatttttttatttggttaatttattttattttttttatttttttttttttttattttgtagagatagggttttattatgttgtttaggatggtttggaatttttggatttaagtgttttatttatttcggttttttaaagtgttgggattataggtatgagttattatgttcggttatattgtttttgtttgtaaaataatttattgtttaaaaataaataaataatttggtatttagaaataggttttgattttaatttaaaaagtgttttgaattttattttaggtttattttttaataaaaatagttaaaaaaaaaaaaaaaaaggtttaaaaagtaatatgtggtagtttttagtatttaggataaattattttatttattttaggatttttagaagtattatagtgaaggtatttttggatttttaagaaatgttttaataatattaggatatttgttttaaaaagtaaagaatttatttaatgaaatttaaagaattttttacgaaatgttaattggaaaaattgtggtatttgaaaggataaaaggtattgtgtttttttcgtgagaatattgaataaatgaagaatatataaaataagtgaaaatataaaaataggtaagtttatagatagaaatttttaaagtatatgatataaaggtatttgttttagaatgaggtattaatatttttaagttttgtattaaatgttttgttttaaaatttatttttttggaagaaaagatgagaattcgttttttatttttttattttttttaaagaaaaagaaaatgttaaaagattttaaaattttatattgaattgattttgttttgtgatagggttttatattgttgtttaggttgaagtgtttacggtttattgtagttttaagtttttgggtttaagtaagtgatttttttattttagtatttatagtagttggagattataggtatgtgttattatgtttagttagttttttttttttttttttttgtaga

SEQ ID NO: 74 - DNA, 5152 bp, Artificial Sequence
  chemically treated genomic DNA (Homo sapiens)
tttataaaaaaaaaaaaaaaaaaaattagttggatatggtggtatatgtttgtagtttttagttattgtagatgttggggtgggaggattatttatttgagtttaggaatttgaaattgtagtgagtcgtgagtattttagtttgggtaatagtgtgagattttgttataaaataagattagtttagtataagattttaaaattttttaatattttttttttttttagggaaagtggaaaaataaggaacggatttttatttttttttttagaggaataaattttagaataagatatttaatgtaggatttgagaatgttgatgttttattttaaagtaggtgtttttatattatatattttagaaatttttatttataaatttatttatttttatgtttttatttattttatatattttttatttgtttagtgtttttacgaaaaaaatataatgttttttatttttttaagtgttataatttttttagttaatatttcgtaagaaattttttagattttattaggtagattttttattttttaaaataggtgttttaatattattgaaatattttttgaaggtttaggaatgtttttattgtaatgtttttgaaggttttgagataggtgggatggtttgttttaagtgttaaggattgttatatgttgttttttgggtttttttttttttttttttaattgtttttattgaaaaatggatttgggatagaatttaaagtattttttaagttggagttagagtttatttttaaatgttaggttatttatttatttttaagtagtgggttattttataggtaagaatagtatggtcgggtatggtagtttatgtttgtaattttagtattttgggaggtcgaggtgggtggaatatttgagtttaggagttttagattattttgggtaatatggtgaaattttgtttttataaaataaaaaaaaaaaaaaatgaaaaaagtaaagtaaattagttaagtgagggggttatttgtttgtagttttagttatttaggagttttaagtaggaggatggtttgagtttaggagtttaaggttgttatgagtcgtgattgcgttattatattttagtttgggtaaggagtaagattttgttttaaaaaaaaaaaaaaaaaaaaaaaaaagtttggaatagtggagtggtagcgttattatatggttgttgttgtgtttatgttgagaggtgttttggggtttttttgttttttgttttttatttttaaaattttaatttattttagatttaaggagtatatgtgtaggtttgttatacgggtataaagttagttttttttgatatttaagattaaaaagtgaaagatatttttattgaaattggttttttttaatatagtttttggtttgtgagaatttttttatttttgaaaaggatttttagaatatttaaatattgagaaatattgtttatattataatttttaatttttatagattatattttatttattttttttatatttataaagagttaagatttttgagcgattgtttttagtttttgttttgaaaattagtaataaaattttttttaaattgaagagtgtaaaaatattttattttttggatagtatatgtggtttgattgaaataattttgaaattatttttaatttatttgtttttttttttttttttttttttagatattaaaatggatcgtaaggataagttatttgtgattaacgaggtaattttggaaagtaattgtaataaaatatttttaaaatgttaatagtggtttattttaaaattaagttatttagtgattttaaaaattattttgtaaaaattatttagatatattttattaattttttaataattggttttttaaatttttattttttatagtttagtgttttatttatttttgtttgttttgtttgaataagtatattgaaatttttttaggagaaggattatgttttattttttaattttgtagtgtttagtattatgttaaatttatagtaggtatttaaaaaattattagttaatatatataaagtaaaataagtttattaaatatatatatatataaaatttatatggtaaaaagtgttttgttagtattaaaagtgatttgtgtggaattggttattaaggtattataaattgaataggttatatttttaaagtattgtttaagatattatatttaggtattttttttaatttttggaagtatagaatataaatttatattttaaagtaaaatttttaaaatttagaagaattaggattatttttttattattagttttttttagagtataaatttttgaatttttgttgtaatattatattattttatgtgttgtagaaattgtttaatagagtaatgtttttgttattatggaatttatattttaatggagataggttataaataaggtttataattttaagtaaagataggagaaataaagtaggttataggttttggatagttgaggttatatcggaaaaatttgtttaaagggatggtgtttaatatttgagtagagacgtagtgaaggagaaatatggtaaaagattatttagttagagaaaatggtaattataaaagtttagaagtggtataaattttttatttttgtgtttattttaagattagtaagaaataaaagttttgttttttttttttaagttgttagggtttgtttatttgtttaattggttttggagataaaagtttttttttgttatttaggttggagtgaagtggtatgattttagtttattgtagtttttgttttttgggtttaagtaatttttttgttttagtttttcgagtagttgggacgataggtatacgttagtatgtttagttaattttttgtatttttagtagagatggagttttgttaggttgtttagataatttatttatttcggttttttaaagtgttggggttataggtatgagttattttatttagttataagttgttaggtttaaagttttaaataatgtggagtttaagagtattatattaattagagtttatgaatattatagtaatataagtttttatttttgtaatgtttttgtgtttttttaagtgtgatttttgtaagtttttaagatattgaagtttaatttgaaataggtttgatatatttaggttttttatttaattttttagtgattttatagaattaaattattagaaatgatagtataaatgaagaataatttaagttttgtgattttagaattaaaaagttaaaaagttaaaaattaaaataattattaaaaaggatgtttttagttttataagtattgtatttttataagattggttaagaagattgattatgaaggattaatataagaagattagttgtggtatgttttattcgtagggtatttatttttagtttttgtagtttgttaatgggattatgggtagaagaggtttttggttaggtgaggtggtttatatttgtaattttattattttgggaggttgaggtaggtagattatttgaggttgggagtttaagattagttagattaatatggagaaattttatttttattaaaaatataaaattagcggggtgtgatggtataggtttgtaatatttcggttatttcggaggttgaagtaggagaattatttgaatttgggaggtggaggttgcggcgagtcgagatcgtgttattgtattttagtttgggtaataagagcgaaattgtatcgtaaaaaaaaaaaaaaaaaaaaggagggaggtttttagtaattagaagtgagattattttagatgttaggtttaaaaatatgatagataattttatttaagatatgggtagagtatttagtttattttgggtagaatatttaagaggaattttaaaggttttttttgtgaataaatatatgtttaggtttttgtagtttattagtttggttaggtatttttgagataatttggatgatattaattatatataattattttagtttttatttatattatttattttatttttttatattttgttttttttaggtttgtgaaatgaagaattgtaataaatgtatttattttgaagttaagaaaaaataggatttttatatgtggtaagagaatgtattaagattttggttaaatttatttaagtggatttgttttttgtattttttatgttatagatttttagtgttttatgttaagggttgagaatgaagtaaatttttgattttacgaaatttgatatttttaaagaaaattaaatgtataaatattataagtatattatttatggtgaataggtggtaagtattgattatatttgttaattagttgaaaaagtttattttatattttttaggtttttaaatttattttacggattatttgttaaattttttgtttaaaatagtaagttgatttaataaatttttttagatgaggaaattaaaagtaattttttgaaatagttgtgtaaaagttataattatttttgtttttgttgtaatttttttagtttatattttcgttgaattgaagatgattggaaattgtttgaaaggttttcggttttttttgttttttgattttgtaagttttttatttagtgtatgaggtttaatttttttatttggtatggttgtttttagtagatatagttgtgttatttaatttagttttatttttattttggttttatggattattaatttttttaggtatatttataatgaggttatagttaagttatagaaataaatgagtaaatagttttaaataaggtagtttattgttaaataatatgtttattttatttttataggtttttgatgaattattatattatgttttgttaaaagaatttttaatttaggtaaatatttttaaaattagttatttaaaatatatatgatatattttggaataaggaattaatatatatttttttaattagatttttagtatattacggtattattttaaaagttaattatttgtggattacgtgtttatttttattattttggataataggatatggtttcggaatttttaggtaagttttatttgatttttaattatattttttttttaattgagtttatttat

SEQ ID NO: 75 - DNA, 6656 bp, Artificial Sequence
  chemically treated genomic DNA (Homo sapiens)
tggtaattttatttttttagttatttaggttaaaaattttattttttatttttttgtttggtttatatttcgtaaataattattaataaattttataggtttatttttaaaatatatataaaatttaattttttttttttattttattttggttagagatatttttatttggaataatatagtataagtttttgattattgttcgtatttttatttatttattatttatttgagatagtttttttttattttgtcgtttaggttggagtgtaacgacggaatgatagtttattgtaatttcgaatttttaggtttaagtgatttttttgttttagttttttgagtagttgagattataggtatatattgttatgttaatttttttttttttttttgagatagagttttgttttgttatttaggttggagtgtaatagtacgatttttatttattgtaattttcgttttttgggtttaagagatttttttgttttagttttgcgagtagttaggattttaggtacgcgttattatttttagttaattgtttgtatttttagtagagacggggttttattatgttggttaggttggtttcgaatttttgattttatgattcgttcgttttggttttttaaagtgttgggattataggcgtgagttatcgtattcggtttaatttttttatttttgtagagatatggtttcgttatgttgtttagttatttttttatttcggttttttaaagtgttgggagaattgtttattattatgatattagtatttagaatatgtggtatataatatgtatttaatatatatttattaagtaaaaatagtatatatagttaaattttaaatgatgttagtgaattagttaattatgtgtttaaattgttttaaatatatgaattaatttatttgattagtttaagaggttaggtattattgttattatttttattttgtagatgaagaaattaaggtataggttaaggttaggaaataaataatattaagtagtttgttttatattatattatggtaaagttaggatttgaatttaggtattttgattttagaatttaaattttagtatattgaaagatttggtgagtaatagattttaattatattttatatataaaaaataaataagaaaaaaaaataaattatattttatataatttgtatgttaagtttattttattatatgtttttgaaaattgataattaatgtattattgatttttaaattaaaatattttattttttgatttttttttattaatgtttttgatgaaatatgtgtaaaatatatatttaataatttttatatttttaaatgtaaatatagtgtaaaatcgagtagttgttgttatgaaaatttttattttttttttttttttttttttttttttttgagacggagttttgtcgtgatttaggttggagtgtagtggtgtaatttcggtttattgtaagttttattttttaggtttaagtaatttttttgttttagttttttgagtagttggggttataggtgtgtattattatatttagttaatttttatttttattttttgagatggaatttcgttttgtagtttagattggagtgtagtggtatgatttcggtttattgtagtttttgttttttaggtttaagtaatttttttgttttagttttttgagtagttgggattataggtatgtgttattacgtttagttaatttttatatttttagtagagatagggttttattatgttggttaggttagtttcgaatttttgattttatgattcgtttgtttcggttttttaaagtgttgggattataggtatgagttacggcgttcggttaagaatttttatttttaagtttgtagtattaatgttgaattaatagattggtatatttatttatgatataggtaatgaaggaaaaaaaatattttagtagatttatttgaagatttattgatttttattgaaaaaggtttgttttatggtttattatttttatggtttttaggttggttatgttgggttttaggtgggttttttagatttttttatttttagggtaagtagtaagttacgggtgggaagtgataggtatttagtatgagtaggaggtaagggatcgtgaggtttgtgtttgtgggtagttggttataatttagacgtgtttgattagtttagtgatagttggagtggataaagtgattaagggttttaaggatatataaggttaagaagatttgaagtgttgtgtaagatatgtttaatgtatttggattttatttttgtttaacgaatatgtatatataaaaaatatttgaattttttgagttaggagtttaagattaatttgggtaatatagtgagatatttatttttaaaaaaattttaaaaaaaattaatttggtatgatagtatttatttgtagttttgtttattttggaggtcgtagtgggaggattatttgagttttggaggttaaggttatagtatgttatgattgtattattgtattttagtttaggcgataagagcgaaacgtttataaaaaaaaaaaaaaaaaaagatttataggtgatggtgatgttgttggttaaggaagtgaagtggttttttgttttgtagtttttttgaatgttaggggttttttgttttttatttgttttatttttattaagttttttttttttagttattttgttagtttttggaaagtattttagtgattgtggtttttatttttttttgattttatagtgtttagggttatgttgtttatatagtagtgagtagtaagttgaggtttttaaaaattttattattattatttttgagatggagttttgttttgttatttaggttggagtgtagtggtataattttagtttattgtaatttttgttttttaagtttaagtgatttttttgttttagtttttcgagtagttgggattataggcgtttgttattatattcggttaatttttttgtatttttagtatagatggggttttattatgttggttaggttgatttcgaatttttgattttaggtgattcgtttgttttggttttttaaagtgttagggttataggtgtgagttattatatttggtcggtttttttaaattttaaaatagatttatttgattttttttttttattttttagtttttttgaggtatgattgataaaaattgtatatatttagggtgtataatgtgatgatttgatatgtgaatgtattgtgaaatgattattatagttaaggtaatttatatatttattattttttagttatttttttagttagtataggttgggtattgtttttttgaaatgttttgggattagaagtgttttggattttagattttggaatatttgaatatatataattagatattttgggaaggggatttaagtttaaatatgaaatttatttgtttttagagtttaaagatgatttttttttttttttttttttgagatggagttttattttcgtttaggttggagtgtcgtggtataattttagtttattgtaatttttgttttttaggtttaagcgatttttttattttagttttttaagtagttggaattataggttcgtattattatattcggttaatttttgtatttttataaagatattttattatgttggttaggttggttttaaatttttgattttaggtgattcgttcgttttagttttttaaagtgttgggattataggtgttagtgattgcgtttggttgataattgaattttttttttggagaagttgaataaattgtgtgttgtgtgtttgtttttttttttgtttttttttttttttgagatagagttagatattttgttatttaggttggagtgcgatggggtggttatagtttattgtagttttaaatttttgagtttaagcgatttttttatattagttttttaagtagtatagtattacgtttggttaatttttaaattttttgtagtgatggggttttgttgtttaggttagttttaaatttttgggtttaagtagtttttttgttttggttttttaaggtggtaggattataggtttgagttattatgtttggttattatttgtgttttgattataatatattatgttggtatttaaaacgttttggattttggagtattttgaattttggatttttggattagtaatgttttatttatagtatattttttgtttgtttttttataaagaattttttgtaattttgattttatagttttaaatgtaatatatttttattgtaaaaattatttttaatagtatcgttagaatagtaaatatgttaatagaaaggtagaagtagattttaaagaatttttagtagtttgagagattatagttaattattgaggaattttgttttggattggagtagtgtttagaagtttataaataatttttagggtattgtatagggatttttttttttttttttttttgaaatggagtttcgttttgtcgtttaggttggagtgtagggtgtgattttagattattgtaattttcgttttttgggtttaagtaattttttgttttagtttttcgagtagttgggattataggcgtttgttattatgtttagttaatttttttggatttttagtagagagggggttttattatgttagttaggatggtttttattttttgattttgtgatttatttatttcggttttttaaagtgttgggattataggtatgagttattgtgtttggtcgtataaggattttttatgtgattttttagtagaggtttttgttttttattttaaatattttttgagggttgtttttttttttcgttttttatttatatagaggttaattagaattaagatgtttgggattgaggaagtaatttttggaggacgtgatagttattttgttgttggcggcggtttagtgttatgttttggataggtaattgtggtttttttatgtcgggaaagaatgaggtgaagtgagtaaagttagggtaaggtagtttgtagagtatcgtagtatatgtgtgagtagtatttagtacgtttatttagtacgtgtgtgagtagtatttagtacgtttatttagtacgtgtgtgagtagtatttagtacgttgacgcggtgcgtgcgggggtagtatttagtacgtttatatagtatatgtgtgagttatttgttattggttttttttttagatgtattttttgggagttttgtgaattttggagggtattttggaatgttagttattaaaagattgatagtattggggattagatttagattttaaattttttgtggggggggatagataatatatttgtatgatattaaatttaaaatgaaattgtgaaaatttttttattttttattgtttttgtgtgtatgttatttagttttattttttttttttttcgagattgagttttgttttgttatttaggttgtagtgtagtggtgcgattttagtttattgtaatttttattttttggatttaagtaatttttttgttttagttttttaagtagttgggataataggtatgtattattatggttagttaatttttatatttttagtagagatggggtttaattatgttggttaggttggtttcgaatttttgattttaggtgattcgtttgtttcggttttttaaagtgtttggattataggcgtgagttattacgttcgggtttaatttttttgtatttttagtagagatgtggttttattatgttggttagggtagttttgaatttttgatttcgtgatttgtttgtttcggttttttaaatgttggaattataggtatgagttatcgcgtttggttttagttgttttttttggaggtatggaaagttattgggggttttattttttgtagggatattgtgtgtatagaaaagagttttttgttttgtttatttaaattttatttttgtttttagtagagagttgtgagtatttattttatttgagtagggtaagggggataaaatttaaattagtaagtagtagtgtgtttttgtttgtgtaggatgggaaattgttgtattggagaaggcgttaatttttggaaaggataaatggaagtaaggttttttattttcgtgtttttttcgtatttgttttttgtgttgacgttatttatagatttggaggtagaatattttagttttttaagttttagaaatatttataaggatggtagtagtagttaaggtagtagtttttaaaatgtagtttttaaaaattttggggtttttgaagattttttagagtttagaaggttaaaattatttttataataatattatttgttttttttatatttattgttttatgagtgaatggtagagtttttagagagtgtatgatatgtggtgatgttattgttatgatgtttaatggtatgtatgttttaaaagttttttagttttgatttttaataggatatatagaatttatataaataaaggttttggggggtttttttaagagtataaagtttttataaaggatggagatttaatgatgtgaggaatggtggaagtgtgaatttaatttttttttttggggttgtagt

SEQ ID NO: 76 - DNA, 6656 bp, Artificial Sequence
  chemically treated genomic DNA (Homo sapiens)
attgtaattttaaaaaagaaaattaaatttatatttttattattttttatattattgagtttttattttttatggagattttatatttttaaaaagattttttagaatttttgtttatgtgggttttatgtattttattaggaattaaaattgagaaatttttaaggtatgtatgttattaggtattatagtagtgatattattatatattatgtattttttgaaaattttattatttatttatgagataatgagtgtgaaagaggtaaatagtattattatgaagataattttgattttttggattttgaaagatttttagaaattttagggtttttgagaattgtattttgagaattgttgttttagttgttgttattatttttataaatgtttttgaagtttaggaagttaaaatgttttgtttttagatttgtaaatgacgttagtataggaagtaagtacggaaagagtacgggggtaggaagttttgtttttatttgttttttttagagattgacgttttttttaatataataattttttattttgtataaatagaaatatattattgtttgttgatttgggttttgttttttttgttttgtttagatgagatgaatatttataattttttgttaaagataaagatggagtttgggtggataaagtaagaaatttttttttgtgtatataatgtttttataaggaataggatttttagtaattttttatgtttttaagaaagataattggagttaggcgcggtggtttatgtttgtaattttagtatttaggaggtcgaggtaggtagattacgaggttaggagtttaagattattttggttaatatggtgaaattatatttttattaaaaatataaaaaaattaagttcgggcgtggtggtttacgtttgtaatttaaatattttgggaggtcgaggtaggcggattatttgaggttaggagttcgagattagtttggttaatatggttaaattttatttttattaaaaatataaaaattagttggttatggtggtgtatgtttgttattttagttatttgggaggttgaggtaggagaattgtttgaatttagagggtggaagttgtagtgagttgagatcgtattattgtattgtagtttgggtgataaagtaagatttagtttcgaaaaaaaaaagaaatagaattgggtggtatgtatataggggtaataggaaatagggagatttttatagttttattttgaatttgatgttatataaatatgttatttatttttttttataaaaaatttaaaatttaaatttaatttttagtattattagttttttgatagttaatattttaaaatgttttttagagtttataagatttttaaaaaatgtatttaaaggaaaaattaataataaatagtttatatatgtattatgtaaacgtattaggtattgttttcgtacgtatcgcgttaacgtattaggtattgtttatatacgtattaggtaaacgtattaggtattgtttatatacgtattaggtaaacgtattaggtattgtttatatatgtattacgatgttttataaattgttttgttttaattttatttattttattttattttttttcggtatgaaggaattatagttatttgtttaaagtataatattgagtcgtcgttagtagtaggatggttgttacgttttttaagaattgtttttttagttttagatattttgattttggttgatttttatataaataaaaagcggaaaaaaaaaataatttttaaagaatgtttaaagtaaaaggtaagagtttttattgaaaaattatataaagaatttttatgcggttaggtatagtggtttatgtttgtaattttagtattttgggaggtcgaggtgggtggattataaggttaggagatggagattattttggttaatatggtgaaattttttttttattaaaaatttaaaaaaattagttgggtatggtggtaggcgtttgtaattttagttattcgggaggttgaggtaaagaattgtttgaatttaggaggcggaggttgtagtgatttgagattatattttgtattttagtttgggcgatagagcgagattttattttaggaaaaaaaaaaaaaaagaatttttatgtaatattttaagagttatttataagtttttaagtattgttttaatttagaatagagttttttagtggttagttgtggttttttaagttgttgaagattttttaaggtttatttttatttttttgttaatatgtttgttattttggcggtgttattaaaggtgatttttataataagaatatattatatttagaattataaaattaaaattataaaaaattttttatgggaaagtaaataaaaaatgtattataggtggaatattgttaatttaaaaatttaaaatttaaaatgttttaaaatttaaaacgttttgagtgttaatatgatgtgttatagttaaaatataggtaatggttaggtatggtggtttaaatttataattttattattttgggaggttaaggtagaaggattgtttgagtttaggagtttgagattagtttagataataaaattttattattataaaaaatttaaaaattagttaggcgtggtgttatgttatttaggaggttgatgtgggaggatcgtttgagtttaggagtttgaggttgtagtgagttatgattattttatcgtattttagtttgggtgatagagtgtttgattttgttttaaaaaaaaaaaaaaataaaaaaaaaggtaggtatataatatatagtttatttagtttttttaagagaaaaatttaattattagttagacgtagttattgatatttataattttagtattttgggaggttgaggcgggcggattatttgaggttaggagtttgagattagtttggttaatatggtgaaatgtttttataaaaatataaaaattagtcgggtgtggtagtgcgagtttgtaattttagttatttgggaggttgaggtaggagaatcgtttgaatttgggaggtagaggttgtagtgagttgagattgtgttacggtattttagtttgggcgagagtgagattttattttaaaaaaaaaaaaaaaaaaaaattatttttaggttttgaaaataaatgaattttatgtttagatttgggttttttttttaagatatttgattatatatatttaaatattttaaaatttgaagtttaaaatatttttggttttaaagtattttagagaagtaatatttaatttgtattagttaagagggtaattgggaggtggtggatatgtgaattattttgattgtggtaattattttatagtgtatttatatattaaattattatattgtatattttaaatatatataatttttgttagttatattttaaaaaagttggggggtagggaagaaaaattaagtgaatttgttttaaagtttaaaaaaatcggttaggtgtggtggtttatatttgtaattttaatattttgggaggttaaagtaggcggattatttgaggttaggagttcgagattagtttgattaatatagtgaaattttatttgtattaaaaatataaaaaaattagtcggatgtggtggtaggcgtttgtagttttagttattcgggaggttgaggtaggagaattatttgaatttgggaggtagaggttgtagtgaattgagattgtgttattgtattttagtttgggtgatagaataagattttattttaaaaataataataataaagtttttaaaaattttaatttattgtttattattatataggtagtatgattttggatattgtggggttaaaaagaaatagaagttataattattgaaatgttttttaggagttaataagatagttggagggaggagatttaatagaaatgaaataaatgaagagtaggaggtttttaatatttaggaaggttatagagtaaaaagttattttatttttttaattagtagtattattattatttgtgaatttttttttttttttttttttgtaagcgtttcgtttttgtcgtttaggttggaatgtagtggtgtaattatagtatattgtaattttgatttttagggtttaggtgatttttttattgcggtttttagagtagataggattataggtgagtgttattatgttaggttaattttttttaaaatttttttagagatgagtgttttattatgttgtttaggttggttttgaatttttggtttaaggagtttaagtgttttttatgtgtgtatattcgttaaataaaggtagaatttaaatgtattaggtatattttatatagtattttaaatttttttggttttgtgtgtttttgaggtttttggttattttgtttattttagttgttattgggttgattaaatacgtttgggttataattaattgtttataggtataaattttacggttttttattttttgtttatattgggtatttattattttttattcgtggtttgttgtttgttttagaggtggaagggtttgggggatttatttggaatttaatatggttaatttagaagttataggaataatgggttatgaggtaaattttttttaatgagaattaatagatttttagatgagtttattgaggtgtttttttttttttattatttgtgttatagataagtatgttagtttgttaatttaatattaatattgtaaatttaaaagtgaaggtttttggtcgggcgtcgtggtttatgtttgtaattttagtattttgggaggtcgaggtaggcggattatgaggttaggagttcgagattagtttggttaatatggtgaaattttgtttttattaaaaatataagaattagttgggcgtggtggtatatgtttgtaattttagttatttaggaggttgaggtagaagaattgtttgagtttgggaggtagaggttgtagtgagtcgagattatgttattgtattttagtttgggttatagagcgagattttattttaaaaaataaaaataaaaattggttgggtgtggtggtgtatatttgtaattttagttatttaggaagttgaggtaggagaattgtttgaatttgggaggtggagtttgtagtgagtcgagattgtattattgtattttagtttgagttacggtaaaatttcgttttaaaaaaaaaaaaaaaaaaaaaaaaaaaaagtgaaggtttttatagtaatagttgttcggttttatattatgtttatatttagaagtatgagagttgttaaatgtgtattttatatatattttattagaaatattaatggaaaaagattaagaaatgaagtattttggtttaagaattagtagtatattgattattagtttttagagatatatagtaaaataaatttagtatatagattatgtggaatataatttgttttttttttttatttattttttgtgtgtggaatgtaattgaaatttgttgtttattaagttttttagtgtattagagtttgggttttggggttagagtgtttgagtttaaattttggttttgttatggtatgatgtagggtaaattgtttaatgttgtttattttttaattttaatttgtattttaatttttttatttgtaaaatagaaataataatagtagtatttaattttttaagttggttaaatgaattaatttatgtatttagaatagtttgggtatataattagttggtttattaatattatttgaagtttaattgtgtatattatttttatttaataagtatatattaaatatatattatgtattatatattttagatgttggtattatagtagtgaatagtttttttagtattttgggaggtcgaggtgggaggatggttgggtaatatagcgagattatgtttttataaaaataaaaaaattaggtcgggtgcggtggtttacgtttgtaattttagtattttgggaggttaaggcgggcggattatgaggttaggggttcgagattagtttggttagtatggtgaaatttcgtttttattgaaaatataaataattagttgggggtggtggcgcgtgtttggaattttggttattcgtaaggttaaggtaggaaaattttttgaatttaggaggcggaggttgtagtgagtggagatcgtgttattgtattttagtttgggtgatagagtaagattttgttttaaaaaaaaaaaaaaaaattagtatggtagtatgtgtttatagttttagttatttaggagattgaggtaggaggattatttgaatttaggggttcgaggttgtagtgagttgttatttcgtcgttgtattttagtttgggcgatagagtgagggaaggttattttaaataaataataaataaataaaagtacgggtagtagttaggagtttatgttgtattgttttaggtgagggtatttttgattaaggtgaaatggggaggaggggttggattttgtatgtattttgagggtagatttatagaatttgttggtggttgtttgcgggatgtgggttaaatagaagaataaagaataaggtttttggtttgaataattggaagaataaagttgtta

SEQ ID NO: 77 - DNA, 5915 bp, Artificial Sequence
  chemically treated genomic DNA (Homo sapiens)
taatgaggatagtttattttatgaagagtaggaggaggtatttttattatttttattttagattgttaaaaattataggtcgggcgtcgtgttacgtttataattttagtattttgggaggtcgaggcgggtggattacgaggttaggggttcgagaatagtttgattaatatggtgaaatttttatttttattaaaaatataaaaattagttgggcgtggtggtggatatttgtaattttagttatttagtaggttgaggtaggagaattgtttgaatttgggaggtggaggttgtagtgagttaagattatattattgtattttagtttgggcgaaagagcgagatttcgttttaaaaaaaaaaaaaaaaaattatgggaggttggttgggagcgggggtttatttttgtaattttagtgttttgggaggttaaggtaggtagattatttgaggttaggagtttaagattagtttggttaatatggcgaaattcgtttttataaaaattagttgggtgtggtggtgtacgttagtaattttagttgttgtagaggttgaagtaggagaattgtttgagttcgggagatcgaggttgtagtgagtcgagatcgtatttttgtattttagtttgggtaatagagtgagatttcgtttaaaaaaaaaaattatggaggttattgtttttaattgagtttttatattaggttttaaaagattagattaaattaagatggagtaattcgtgttaaatgttatgtaatttaattgaaattttaaagaagtagatagattttaaaatagattatttttttttgaaaataggagagtttaatttatttaagttagtttaataaggaagttttttttgttttaattttataaaaaagtaatttgaagtatttgatgttaattaattaggtttttttttattgttgttttttggtttttattttataaaatttattattttgttattgtttaatggaagtttttattttattttgtagaatgggggttgttttaatttatgaattataaataaaagttaatttgatttataattgaatttgtaagggagattgagtgatttgtttaaagttatatatttagtaaatattttagttagggatttgttttaagtatttaattatatatttaagtataggttgggggagggagggggtaatgtttaggtagttattttgggtttttgtagagtgggggtagggtgggtggataatgaggatggtattttttttttttttttattatagttttttggaattatttttaatttttttttgttttttaggattggtaggtatttgtagtttttttttttttttttttttttttttttttttgagacggagtttcgttttgtcgtttaggtcggattgcggattgtagtggcgtaatttcggtttattgtaagttttgtttttcgggtttacgttatttttttgttttagtttttcgagtagttgggattataggcgtttgttatcgcgttcggttaatttttgtatttttagtagagacggggttttattttgttagttagggtggtttcgattttttgatttcgtgatttattcgtttcggttttttaaagtgttgggattataggcgtgagttatcgtgttcggttttgtagttttttttttgtgtgtaatgttttttaggtttatttattttagatttttattattattttttttttaatagtttttataagttttgtaggattttttgtaataggttttgggaagagggagggattggtagagaaatagtttgtatttagaagagaaggggggtgggttagagtaagattattttgtgttatagagttggaaaaggattgttttcgatatttgtatattttattttgttttttgtgtttttgataaaggataatggtatggggaaattaagagatttaggaagaattttaatttaggtgtgtgtggttttaaagtttttttgtgttttttgttgttgttgttgtttgtttttttgagacggggttttgttttgtcgtttaggttggagtgtaatggtacgatttcggtttattgtaattttcgttttttggatttaagttatttttttattttagtttttcgagtagttgggattataggtattcgttattaggtatggttaatttttttttttgtatttttgtagagatggggttttattaagttgtttaggttggttttaaatttttgaatttaggtgatttatttattttagttttttaaagtgttgggattataggcgtgagttattatattcggtttttaaagtttttttgattttatagtattttttttgggtttttggaataaagatatataggatttagttaaattgtaggatagatttaaagttgggtttttaaaaaatagggttggagttgtttgttaaatttttgttgttttattgtttagtgggttattgtaggttgggatgagttatagggtagaggtcgggagttgtagaaattgagttgttatttttggggaagtatgtttattatttttattattttggaggtagtgcgttttaggaggtagaagttagtatggttggtttttgttagggttttcgggtgttttgtagagagtggtatgtaggttttggattttagggtttggttagttttttggttgagtagaggttattggttaagtttttttattattgttttgagtttttggtggttttgtgttttttaatatatgtggtgagtagagtagagttgggaatacgtagagattgttggaggttagggagttaaaggttaagagagtagaataatgtcgaagtattatgtttatggttttcgagtgtttttagtttatgggtaatttttatttttggttttttgttatattatacggttttttattggtttttttttgatatattgtggttatgtaataatggttgatttttggttttttttagaagaagaaaaaaaaaattatatttataattgttatattagtttaaggaaaatttttgttatttaatattgttagtttattgtttattttatattttttttatgtaatttttatattattttgagattatagttaattattttttttaggagaggaaacggaagtatcgagaggttttttttatcgaaatgatacgaatggtaaattgttgagttgggattgaaatttaggtagaggaaggaagtaatgaatggaaagaggtggtttagttggaattagtaggtatttaaattgtgtagtttttttttttttggttttttgtaagggtaataattttgtttaatttatttaaatatttatatgtaagagtaattttaaaattttagttttcgtcgggtatagtgatttatatttgtaattttagtattttgagaggttgaggcgggtagattatttgaggttagaagtttgaaattaatttggttaatatggtaaaattttgtttttattaaaaaaatataaaaattagttaggcgtggtggtaggcgtttgtaattttagttatacgggaggttgaggtaggagaatcgtttgaattcgcgaggtgaaggttgtagtgagtttagatcgcgttattgtattttagtttgggcgatagagtgagattttattttaaaaaaaaaaaaagtaataaaaaaataagtaaataaaaaagttttagttttggtatttttttgttaaattggaatagttgttttggattgtagggtttacggaggtgagtaaaagtagttagtcggagggtatttggttagttggttgcggaaaaggttttagtttcggacggttgagtttatttttagtttaagaggttattattataagttatttttttcgatttattagttgtagtttagcgttgttttattggggatttgaatgttgttttttattttgtaaagtttttttatatttttttattatatggaatttttaaattataattgtggtatttttattttaattatttttattatttatttatttatgtatttattttttgaggtggtttcgttttgttatttaggttggagtgtagtggagtaattacggtttaaggcgtttcgattttcgattttcggggtttaagcgattttttttttttagttttcggagttggagttataggtgtgcgatgtttcgtttggttatttttttttttttttgggtagagacggggtttcgttatgttgtttaggttggtttttaatttttaggttttagcgattttttcgtttcggttttttaatgtgttgcgaatatagattttagttatcgtatatagtttatttttatttttttgaaaaatgaattcgagggtaaagggggcggggttgaggtagatgttagaatttgttcgttttaattaagtagttaggttgtttgtttagaaagtcggtatttagtttttttaggaaaacgaagttaaggtttttatttttttcgttaataacgttagaatagaggatagtttttagattttagggattttaaatagattggtagtttttggagaataaatattttttgttttttttttgtatatttttgttttaggttattttttttcgtttttaaagtttattttttttaagtttttcgtacgagaaaataagtgagttttttttattggttagattttttgttaattttttcgttatgacgtcgagtggtgttttttgaagtttttttagtttcgtttttttaatttgattggtttatttaaataaatttcggttaatttagtcgtttataggtggatataaaaggtaagttacgattggtttttttggacggagacggtgagagcgagttagggattggttggtttgtttcgggcgggttaaaggaaggtttaagtggagtttttttaatcgacgcgcgtttgtggagaagcggtttggtcgggggtggtttcgtggggttttgtttgtttagtcgtttttagggtttttgagtttttttacgatcgttattatggaagtgttattattgtaggtacggttcgcgggggggattggcggtggagttttcgcgcggttcgggtatttttttggtcgttcgtgacgggtgaagttttggggttgcggttaggtcggcgatcggtttgggagtttatattttttattttcggtttcggggtgatcgtggagaggcggaagttttttttggtgttagtagtgaagtatgattcggtttttagggtgtcgtgcgttgttgttttgtttttaggggtaggagttcgttggtttcgtagtggatttatgttatagcggttcgggtgcgacgttattgagtcgcgcgtatagatgttttttttttttgttcgttgtttgaaaacggttttgaatgttttcgattttggaaagggtagagtttagtatagtgtttttttggagtagttggttagtttataaaagcgttttttttttgagtttataacgtttaggtggttaagggattgaacggatagtcgtttaaattgttgttgtcgaattagaattatttacggtgtcgtgtgttcgggatatcgtaaataatttataataataggtattcggtaaataatgtatgtaggaattgaaagaagtgggtgtattttattgatgatatttattatgttgtttaagaaaagaggtttttagatagatttatttggtgagataatatgtgtttgtttaatttgatatttggggatttggtcgtagcgaatttaaattgttttatttgtataaaattggtaattttattattgtttattaatagattgtaatgtatgttgatattttattatggtaggtattttgtttttagtttagggtaaatttatgattaaaaatttttttttttttttttttttttttaattgttagt

SEQ ID NO: 78 - DNA, 5915 bp, Artificial Sequence
  chemically treated genomic DNA (Homo sapiens)
gttagtaattaaaaaaaaagagagaaagaagggaatttttaattataagtttattttaaattaggaataaaatgtttattatagtgagatgttaatatgtattgtaatttgttagtaggtagtggtggagttgttagttttgtataaataggataatttaaattcgttgcggttaggtttttaggtgttaggttaaatagatatatattattttattaagtgggtttgtttggaaatttttttttttgagtaatatggtagatgttattaataaaatatatttattttttttagtttttgtatatattatttatcgagtgtttattattataaattatttacggtgtttcgagtatacgatatcgtaaataattttagttcggtagtagtagtttgggcggttattcgtttaattttttggttatttgagcgttgtgaatttaggaagggggcgtttttgtaagttggttagttgttttagagaaatattgtgttaggttttgttttttttaagatcggggatatttaagatcgtttttaagtagcgggtaggaggggaaagtatttgtacgcgcgatttaataacgtcgtattcgggtcgttgtaatatggatttattacgggattaacggatttttgtttttagaaatagggtaataacgtacgatattttggaagtcgggttatattttattattagtattagaaggggttttcgtttttttacgattatttcggaatcgggaatggagaatatgggtttttaagtcggtcgtcggtttgatcgtagttttagagttttattcgttacgggcggttagagagatgttcgggtcgcgcggaggttttatcgttagtttttttcgcgagtcgtatttgtaatggtgatatttttatggtgacggtcgtgaaggggtttaagaattttgaaagcgattaaataggtaggattttacgagattattttcgattaagtcgtttttttatagacgcgcgtcggttaggagagttttatttgaatttttttttagttcgttcgaagtagattagttaatttttgattcgtttttatcgttttcgtttagaagaattaatcgtagtttgttttttatatttatttatgaacggttgagttggtcggggtttgtttgaataaattaattaggttagggaggcgggattagagaggttttaaaaggtattattcggcgttatagcggagagattgatagggaatttggttaatgagaagggtttatttgttttttcgtgcggaaagtttggaagagatgggttttggaagcgggaaggggtggtttgaggtaaaagtgtgtaggagaaaagtaaaggatgtttattttttaggaattgttaatttatttaagatttttgaaatttaaaaattgttttttgttttgacgttgttagcgaggggaatgggagttttagtttcgtttttttgaggaaattgagtgtcggttttttggataggtagtttggttgtttggttgaagcgaatagattttggtatttgttttaatttcgttttttttattttcgaatttattttttaaagaaataaaagtaggttgtgtgcggtggttggagtttgtattcgtagtatattgggaggtcgaggcgggaggatcgttggagtttaggagttggagattagtttgggtaatatagcgagatttcgtttttatttaaaaaggaaaaaaaatagttaggcgaggtatcgtatatttgtaattttagtttcggaggttgaggagggaggatcgtttgagtttcggggatcggagatcgaggcgttttgaatcgtgattgttttattgtattttagtttgagtgatagagcgaggttattttaagagataaatatataaataaataaataataaaaataattaaaataaaagtgttatagttgtggtttgggggttttatatagtggaaggatgtagaaaggttttgtaaaatggagggtagtatttaggtttttagtagagtagcgttggattgtaattggtaaatcgaaagggataatttgtggtggtagttttttgagttgagggtgggtttagtcgttcggggttgaaatttttttcgtagttagttggttagatatttttcgattggttatttttgtttattttcgtgaattttgtagtttagaatagttgttttaatttgataaggaaatgttaagattgaagtttttttgtttgtttgtttttttgttgttttttttttttttgagatggaattttattttgtcgtttaggttggagtgtaatggcgcgatttaggtttattgtaatttttatttcgcgggtttaagcgatttttttgttttagtttttcgtgtagttagaattataggcgtttgttattacgtttggttaatttttgtatttttttagtagagatagggttttgttatgttgattaggttggttttaaatttttgattttaagtgatttgttcgttttagttttttaaagtgttgggattataggtgtgagttattgtgttcggcgaagattgaagttttaaaattatttttatatataaatgtttgagtggattaaataaagttattatttttataagaagttagaaaaaaaaaaattgtataatttgagtgtttattaattttagttgagttatttttttttatttattgttttttttttttatttgggttttagttttaatttagtaatttgttattcgtgttatttcgatggaggaagtttttcggtgttttcgtttttttttttaaaaagaataattaattatgattttagagtagtgtgagggttatatgagagaagtgtaaggtaaatagtgggttgatagtattaggtagtaggaattttttttaggttggtgtgataattgtggatgtaattttttttttttttttttaaaagaaattagaggttaattattgttatataattatagtgtgttaagggagggttaatggggagtcgtatgatgtggtaggaagttaaggatggaagttgtttatgggttaggggtattcggaaattataggtatggtgtttcggtattgttttgtttttttgatttttggttttttggtttttagtagtttttgcgtgtttttagttttgttttgtttattatatgtgttagagagtataggattattaggggtttagagtagtggtagggaagtttggttagtagtttttgtttagttagaagattgattaggttttgggatttagggtttgtatgttattttttgtaggatattcgagggttttgatagaaattagttatgttggtttttattttttagaacgtattatttttaaggtagtggggatggtgggtatgtttttttaaggatggtagtttagtttttgtagttttcggtttttattttgtagtttattttagtttgtagtgatttattgggtaatgaggtaataggaatttaataagtagttttagttttattttttaggggtttagttttaaatttgttttgtagtttagttggattttgtgtgtttttgttttaaaaatttagaagaagtattgtggagttaaaaggattttggggatcgggtgtggtggtttacgtttgtaattttagtattttgggaggttgaggtgggtggattatttgagtttaggggtttgagattagtttggataatttggtgaaattttatttttataaaaatataaaaaaaaaaattagttatgtttgatggcgggtgtttgtaattttagttgttcgggaggttgaggtgggagaatagtttgaatttaggaggcggaggttgtagtgagtcgagatcgtgttattgtattttagtttgggcgatagagtaagatttcgttttaaaaaaataaataataataataataaaaaatataaaaggattttggggttatatatatttaagttagaattttttttgggttttttggtttttttatgttattattttttattaaagatatagagggtaaaatgagatatgtaagtgtcggggataatttttttttagttttgtagtataaggtggttttgttttggtttatttttttttttttttgggtataagttatttttttgttagtttttttttttttttagagtttattgtagggggttttgtaggatttgtggggattattgaagaaagaatagtggtgggggtttgggatgggtgggtttggaaggtattgtatataaagagggaattgtagggtcgggtacggtggtttacgtttgtaattttagtattttgggaggtcgaggcgggtggattacgaggttaggagatcgagattattttggttaataaggtgaaatttcgtttttattaaaaatataaaaattagtcgggcgcggtggtaggcgtttgtagttttagttattcgggaggttgaggtaggagaatggcgtgaattcgggaagtagagtttgtagtgagtcgagattgcgttattgtagttcgtagttcggtttgggcgatagagcgagatttcgttttaaaaaaaaaaaaaaaaaaaaaaaaaagagggaattgtaggtgtttgttagttttgggaggtaaaaaggggttgggggtagttttagggggttgtggtggggggaggggaaagatattatttttattatttatttattttgtttttattttgtaggggtttaaagtagttatttggatattatttttttttttttttaatttgtatttgaatatgtggttgagtatttaaggtagatttttgattagggtatttgttgggtatatgattttgggtaagttatttagttttttttataagtttagttgtagattaaattgatttttatttgtgatttatgaattggggtagtttttattttataaaatagaatgaaagtttttattgggtaatagtagaatggtgggttttgtaaggtgggaattaggaaatagtaataggaaaaaatttgattggttaatattaggtattttaggttatttttttgtggagttaaagtagaggggatttttttattaaattgatttaggtagattggatttttttgtttttaggaaaaagtggtttgttttggaatttatttgtttttttaaagttttagttggattatatggtatttagtacgaattattttattttggtttggtttagttttttggggtttagtgtaggagtttagttgaaaataatggtttttataatttttttttttagacggagttttattttattgtttaggttggagtgtaggggtgcgatttcggtttattgtaatttcggtttttcgagtttaagtaatttttttgttttagtttttgtagtagttgagattattggcgtgtattattatatttagttaatttttgtagaggcgggtttcgttatgttggttaggttggttttgaatttttgattttaagtgatttgtttgttttggttttttaaagtattgagattataggagtgagttttcgtttttagttaattttttataattttttttttttttttttgagacggagtttcgttttttcgtttaggttggagtgtagtggtgtgattttggtttattgtaatttttattttttaggtttaagtaatttttttgttttagtttgttgagtagttgggattataggtgtttattattacgtttagttaatttttgtatttttagtagagatgggggttttattatgttggttaggttattttcgaatttttgatttcgtgatttattcgtttcggttttttaaagtgttgggattataggcgtgatacggcgttcggtttataatttttaataatttaaaatggggataatgggagtatttttttttgttttttatagggtgagttatttttatta

SEQ ID NO: 79 - DNA, 8961 bp, Artificial Sequence
  chemically treated genomic DNA (Homo sapiens)
  unsure (3866)
taacgagggaaattggaagttttgtagaacgggggagaatggttcgtttgttataatgagtgtagtaagagggtgggttagggagttgaagggaaggttggaaaaagaaaatatttattttaaaggtgatagggagtttttgataggatttgatgtttttgatgttaaaaattttagttttaagatgaggagagttaaatgtggaatgttagtgggtttatagagttagttaggagttagcggaagatttgtttgtatttttggtgttttgtttaggagtagggggattgtaattttttgaggtaagtttttgttttttttgaatttatttttttgtattagttttttagttttttggattttagagaaggggagagttatttggttaggtttttttttaggaaaatgagatgagaagggtaatgtagagatggtatgaggtttattttatttattattggttagtaaagggttttttttataaggaagtttaagtttttttttaattcgttttatttttataggttttggatttatgtaaaaaaggtatatgagtagagggagatattatttttggtttggggttagggtagtaaggtagtggtgttgggatattggtttttatttaggttttgaatttttgggagttaggaaaagggaaaagtgataggttgatgggttaggttttttgagggttaaagggttttaagattgggtttttttttggttaggcgtagtggtttacgtttgtaattttagtattttgggaggtcgaggcgggcggattatttgagtttgggcgttcgagattagtttgattaatatggagaaatttcgtttttattaaaaatataaaattagtcgggtatggtggtatatgtttgtaattttagttattcgggaggttgaggtaggaaaattatttgaatttgggaggttgaggttgtagtgagtcgagatcgcgttatggtattttagtttgggtaataagagcgaaatttcgttttaaaaaaaaaaaaaaaaaaaaaaattaggtttttttttgaggtgggaagattatttgagtttagaagtttaagattagtttggtaatatagtgaaatttcgtttttataataaatttaaaaattagttgggtgtggtggtgtatgttcgtggttttagttataggtgggaggttgaggtgggatgattatttgagtttaggaggttgaggttgtagtgagttgtgattgcgttattgagattttgttttttaaaaaaataaaaaataaaataaaaaaaattcggttattttagtttttaggattgggtttatagggtggttggagggtatgtataataagggaaggagatggtatacgttggagggttattttggggtataatttaatgtagaaggttttttggattgttgatttttttttttttttttttttttttgaggtagagttttgttttgttgtttaggttgtagtgtagtggtgtaattttagttttttgtaatttttattttttgggtttaagtaatttttttgttttagtttttgagtagttaggattataggtacgtgttattatgttaggttaatttttgtatgtttagtagagacggggttttattattttggttaggttggttttgaatttttgattttgtgatttatttgttttggttttttaaagtgttgggattataggtatgagttattatgtttcgttggaatattgatttttatataggtaggggaagatggggaatattatataattaaagatttttttttttttgaggtggagaatgtggttttaataagatgaggatggaggttattggagatattatgagattttaggatataaaatgggaaagtgtttgaaaaatatgggatattgaggataagtaggatttggtgtttaagaatgagggaaataatgttggtatattgtggagttttttaagaaggaaggatatgaatatattataggattttagtattaggaatgttggatggatgaatattgttttttaagaaaaattttttagtaagtagggaatagataggagattatgttgattatggtttatatttataaattttttaagtattattttttagtttttagaaggattacgataaattttattgggatatgtttttttttggaattagtgggattttattttttgtaataggaaattgggaaatagtgtttagtagtttttttttggtattattttgtcgtgtattatagtttgtttggttgtttatgttttttgaagggaggttttttggttttttttgattttttatggtgcggagttcggttttgttaggtattttgttaatataggttgaatgaatatgagtagtggtgagtagcgggagggtaggtttttatttttggtgtgtatagagtaggaatttgagtttatatcgtgatgggatgtttatttttaggaatggtttgggggtgttggtgaaagatttttgatttggggatgtggtgagggggaggattgttagaatgttgagagatagtttttggatgggagttggtaattattatgggatgttgtagggtgaattagattttatgtaaatgttttatttgttagtttggtattttggttggttggtgttttttaaaatttaggagttggaggtaagtatttggaaaatatttagattttggtgggattgggtggggttttaggtgggtttttagttttcgagtgtttggaaatgatggtatgagggaagttggggttttagatattaggaggttttttgttaggatattattttggtttagaaagggattaaggtgtgtgtaagtgggggcggggataaggaagcgtgggtagtttgtttggttttttttgttttgggtgttagaatagattgatagcgtttggagatgggggtgggaagaatatgaatattatgggatgtttggttcgaagggtataggggtggtagagtggagatgaagtattatgggatgtgatattgggttgtgttgggagtattatggtatgtttggttgattacgggttttttgtaattattatgggatgttaggatgtgggtaggagagtaaaattattatgggatagttttttagtgttagaggaaaagagattagatgtttatttgtggggcgatagtagggttgttgattattatgggttatttttttgatagaggaggggtatttattataggttgtggagttagaagagggaaggttgggggtgatgtgagtttttagattttggtttgtagggattgagggtagttttagggggttagttattatgggatgttagtatagaaagtgggagattgattattacgggatgtgtgtgggaggaggtcgagtgttcgttgttgtagtatgggggggggtgagtttttgattattatgggatattaaattgggggtggatgaaggatggttattatgggatgtttgtgggggatggggttgaatattatgggatatgaggtataagtgttgcgaggggtgtttattatgggatggttatggggagggaggggtgatgaattattatgggatgttagtattaggtttaagagtgaagaagaagttggtaaaggatgtttattatgggatgtttaagagggttagttgtaaaaggtttgtaatattttgagatgttagtagtttttggtatatgtgtatgaaatgtgggggggtagggtgtgtgtgtgttgtgtgtgtgtgtgtgtgtgtgtgtgtgtgtgtgtgtgtgtgtgttgggggggggggtgttcgtgtgtattatgggatggttaggaggtgggcggttgtttaggtgacgcgcgcgcgttcgtttngaagggggcgtggttagtggttgtttgagcgacgagggggcgggggttgttcgggagatttggggaggagggtggcggtagtggaaggggggggttggagttggttgaggttattatgggttgttcgtgggggggcggggtttgtgcggtgggatttttcggtcggtgttttaggttttttaagaggcgacgttggagtcggagttattttttttttttcggtcgcggcgaggaggagtcggagcgggagtgatatcgagtcggatttagcgcgatttgcggcggtttcggggtgaggagagcgcggggtttttaaagagacgttttttacggttttattagtttcgagggttatttcgttattcgttttttttttaggcgttttcggattcgcggatcgttttttgtttagaggagtcgatttttttttttttggttttgtagggcgttcggttttttttttagttttcgttttaattttgtcggagttttgtttttcgcgatttttcgttttcggtttggttttttataatgttcggcgtttattttttcgttttttgattatttgtttttcgggatacgtggttcggtttttttttcggtgggacgttttcgtttttcgcgtttttgttttcggtttttcgtagcgttcgagtttttacgttttttcgttttcgtagtttttgaggagaatttgagttgttttagaggatagtttttggagagttgttttgtttggggattggttttttttcgggcgtagggaggcgtttttttatttttaagtgattttgtgttttcgagcgtttcgtcgtttgcggttttttttggttttttcgcgtcgttgttattcggattttttttttcgttatatttcgttcggtttagtttcgcgtttttttttttcgcgtttgtattagtttgttttcggaggcgtcgttttttcgtttcgtgggggcgtttgtcggggagtcggttttcgggttgttttcgaggagtgtggaattaagtttagtttgagcggttcgggtgttttgttagggtggttggggtggggggcggaaagagcgggtgggtgtgggggagggggatagtgcgcgttattgattgttttgtgttttttttttttttttcgtatagtgattcgggttagtgtagaggtttttaggtcgtcggtaggagtagttgggttaattttttggtcgggagcggaaggggatggcgtcgggtttgggtttttcgtttttttgttcggcgggtagtgaggaggaggatatggatgtatttttgaataatagtttgtttttattttatttaggtaatattttttttaagggtttatggcgggaaggagatatttggggttttttcgagtgatttttttggtgaggtagggttgtgttgtttcgttgtttttgtgtagagtcggaggtggagggtattcgaagggagtggtttttttttgcggagttttggtgtgaggggggtggaagttatgtgttttttgggtacggagatgttagtttgttgtattttgttttgaggaatgttttgtagtttttagttgagggagttttttgggttggtaggtattatttggtatgtgggttttcggaggaatgtaggtagttgggatttttggaggtttgtggtggtggtggtggaggggggcgttgaggattttgtttgaaagattagtcgggtatttgtgttagtaggattttgtggttgttgttgtggaaaggaaagagggagtgttggttatattttatttgattatttttagtttttgatcggttatcggttttttgtgttgtttgaattgtgtgaagtttgaatcgcgttttttagtaggatttggagtgtttaaagtagttaggtagattgttggaatgttttgagtggggaagtgatgggggttcggggaggatgtaatagtttagtgaagaggggtaaaagaagggagggtatttttttttttggtgagtggatatagttttggttttttttttagtggtttttgtttttatgaggtagtttgcggtttaggttggtagtgtgaagtgtttgtgtaggtgtgttaggggttacgttatttgtgttttggggtggttttatgaattggttaaattcgtatggttgtaattattttgtttgattgggggaattgttgtttatttttaaatgatggttgatgttatgtttttaagtagatgttttttttttttgtgtttttttttagagtttttagttgtgttatttatttatttttttgatttttatgttttttagtttaatttttttttttatatgttatttttttattttttttgtttttagttttttttttattttggagtttgttgattttgtttttgttttttatttagtattatttatttttgttttttttttttttagttttagtggaagttgaggtggtttgggagagatgtttttatatttggtattttttaagttggaattttttattttaatttgaggttatttaggagaggggttagtgttgttatggagtttgggttgttgggatgagaaatttggttttatttttgtgtagagtagggggtagatttttatgtttttgtttaaggtgagggcggagttgtggtgttggtaaggggattttgtttttttgagaggggtatgagaaatagtagtgttgtttaaatattttgggttttacgttttggttttttattggttatttgggttggggttgttttttatgttgatcgggagttgcgtaggagttgtgaattttgttttgagttgtagtatgatttattttttttatttgttatattttatttttgttttttttttaaattttttttatattttagtaagtttgcggtttgttattttagtatattatttgtttgagaagtttggggggttttatgtgtatggaaggatgttttttttgtttttatgggttgtttttgtttttatttttagtttttatgggggtggtgagatgtagttgatgggggttgggggttgatttggggattggtggggaaaagtttttaagaaaatgattttttttggtgaaatttaggttgatgttgtatttttaagggggaatgggaggggcgtttttgtgtttggttttattttgggttgagaagtagggaggttgatggtgttttgtttagtttaatgttttattttttagtatttgtttagtttaggaagtggggagttagagatattttagggttaattttgggggttaagagttaagaatatgttagggattgaaggagggatattatttttttttttatttttgagatggggttttattttgtcgttaaggttggagtgtagtgtgcgattttggtttattgtaattttcgtttttcgggtttaagcgatttttttgttttagttttttgagtagttgggattataggtatttattattatgtttggttaatttttgtttttttagtagagatagggttttattatgttggttaagttggtttcgaattgattttaaatgatttgttcgttttagttttttagagtgttgcgattataggtatgagttattgtattcgattgggatatttttttttattattgtttaggttttgttttgtttttttgtgtagatatttttatatgttggataggaatttgggtgggagtggtgaggaagttgagttttagagattttttgtgggtttttattttttaaattaaattttttgggtattagaaatttggggagaaggttgtatgcgttgattataagtttattgagtttttgttaaattttagttttgatgattgaaaaaataattatgattgagggagtgatcgagttttttttttagtattatttttatgtttgtttcgttttttttgggtttttttgtttaggatgttagggtgggtttttgtgaattgttgttattttagagtaggtggtatttggatttggggttaggtaatttggggaggtttttatgagggtagttttttttttcgttattttattttttttaaatttatttttttttttgttattttttgtttgttttatgttggtagttgggtgttttgggttggtttttgcggttaggagttattttttttttttttagtgggtgaggtattttttttttttttttatttttttttttatttatttttttttgggcgggggtggtttgggaagagggagagaggagggaggagggagtcggagttagtgtgaatgtttgttataaaggaagttgttttttggttttttttgtgtttttttttatttatttttgtttaggagtttttagttttatttaggttttgtgtgtgtttttagttaggggaggaggtggagttagatgggaggaggtttgttggggggcgggtgtaggggagatggtgatagttgggttgattcgggtttttagggagaagaggttgttgatttaggagaagttgaggaggaatattagggttggagatggggaaaggaaattgtattttagaagtgggtatgagattgagttggtatttgaatttaggatttggaggttttggttaatttgagtagtgatgattttaaagtggttagagaagggtgtggttttcgagatttttgaattgattttgttttgggaaggtatattttatagtttttgttttttgagtaggattttttatttttattttttggtttatagaataatttggtggttagttataggaggtttaaatttagtttttttatttggtgaattttgagtagtttagtttagttgtattggtgaatatttagaggattggtaggaacgggagagaggaggtaggggtttggatagttgttcgaggtgggtttggtttggtttggtaggtttatttcgggtatatatagttttttttttgtttgtttttgttttgggtattagtttttttttgtatagagtatagtagttttttttagaggaatttgggataagaggtggggaataaagtttaaagtttttggattagggtttaattttttgttattgattttttttttgtttattattttttgttaaatatatgtaga

SEQ ID NO: 80 - DNA, 8961 bp, Artificial Sequence
  chemically treated genomic DNA (Homo sapiens)
  unsure (5096)
tttatatatatttggtaaagagtggtaggtagggaaaagattaatagtaaaaggttaggttttaatttagaggttttagattttattttttattttttgttttagatttttttgaagagaattgttatattttgtataggaggaagttgatatttaggataaaaatagataaagagagagttgtatatattcgaaataggtttgttaggttagattaggtttatttcgggtagttgtttagatttttgttttttttttttcgtttttattagttttttagatgtttattagtatagttgaattgagttgtttagagtttattaagtaagagaattagatttaggttttttgtaattggttattaagttattttataaattagggaatgagaatgaaagattttatttagaaggtaaaaattatagaatatatttttttagaataggattagtttaggggtttcggaaattatatttttttttaattattttgaagttattattgtttaaattaattagaatttttaagttttaggtttaggtgttagtttaattttatgtttatttttaaaatataattttttttttttatttttaattttaatgtttttttttagttttttttgggttagtagttttttttttttaggggttcgaattagtttagttgttattattttttttatattcgttttttagtaagtttttttttatttggttttatttttttttttggttggaggtatatataaagtttgggtaagattgaaagtttttgggtaaggataggtgggaagggatatagagaagattaggaggtagttttttttgtaatagatatttatattggtttcgattttttttttttttttttttttttttttttaagttattttcgtttaaaggggggtgggtagagaaaggagtggagagaagaagggagtgttttatttattgaggagagggaaaatggtttttgatcgtagaagttagtttagggtatttagttgttaatataggatagataggaagtggtaggggagggggtgggtttgagagaggtggggtggcggggggggagattgtttttatagaagtttttttaaattatttggttttaggtttaaatgttatttattttgggatgataatagtttataagagtttattttaatattttaagtaaggaaatttaaggaaagcgagataaatatgaaggtaatattaagagaagaattcgattatttttttaattataattatttttttaattattagagttgagatttaataaaggtttagtggatttgtggttagcgtatataattttttttttaaatttttgatatttaaaagatttagtttgaggaatggaggtttataagaagtttttgaagtttagtttttttattatttttatttagatttttatttaatatatgggaatgtttgtataaaaaaatagagtaggatttagatagtggtagaagagaatattttaatcgggtgtaatggtttatgtttgtaatcgtagtattttgggaggttgaggcgggtagattatttgaggttagttcgaaattagtttggttaatatggtgaaattttgtttttattaaaaaaataaaaattagttaggtatggtggtgggtgtttgtaattttagttatttaggaggttgaggtaggagaatcgtttgagttcgggaggcggaggttgtagtgagttaagatcgtatattgtattttaattttggcgatagagtgagattttattttaaaaataaaaaagaaaataatattttttttttaatttttgatatgtttttagtttttaatttttaaaattagttttaaaatgtttttggttttttattttttgagttagatagatattagggaatgagatattaggttggataaagtattattagtttttttgttttttagtttagaataagattaggtataagaacgttttttttatttttttttgggaatgtaatattagtttggattttattagaaagaattatttttttaaggatttttttttattaatttttaagttaatttttaatttttattagttatattttattatttttataaaagttggaagtggagataaagataatttatggaggtaaaggggatatttttttatgtatatggagttttttaaattttttaggtaaataatatgttgaaatggtaaatcgtaaatttattgagatatagagaagatttaggaaagggataggaatggggtgtggtaagtggaaaaagtgggttatgttatagtttaggatagagtttatagtttttgcgtagttttcggttaatatgaaaggtagttttagtttaagtggttaatgggaggttaagacgtggaatttagaatgtttaggtagtattattgttttttatgttttttttagaaggatagggtttttttattagtattataatttcgtttttattttgggtaagggtatggaaatttgttttttattttatataaggatgaaattaagttttttattttaatagtttagattttatgataatattaattttttttttaaatggttttaggttgaagtgaagaattttaatttaaaaagtgttaaatgtgaaagtattttttttagattattttaatttttattgaagttaagaagagagaaggtagaagtgaatgatgttggatgagaaataaaaataggattagtaggttttagaatgagaagaaaattagaagtagaaggaatgaagaaatgatatgtagaaaaaaaaattaaattagaaaatatgaaggttaaggagatgagtaggtgatatagttaggggttttgaaaaaggatatagaagagaaagatatttgtttaggggtatgatattaattattatttgaggatagataatagtttttttaattagatagggtggttataattatacgggtttggttagtttatgaagttattttaaaatatagatagcgtaatttttagtatatttatatagatattttatattgttagtttaaatcgtaggttattttatagagatagaagttattaggaaaaaagttaaaattatgtttatttattaggaggaggagtgttttttttttttttgtttttttttattaggttattatatttttttcgagtttttattatttttttatttaaaatattttagtaatttgtttggttgttttaagtattttagattttgttgaggagcgcgatttaaattttatatagtttagatagtatagaaaatcggtaatcgattagaagttaaaaataattagatagagtgtaattagtatttttttttttttttttatagtagtaattataggattttattagtatagatgttcggttggttttttaaatagaatttttaacgtttttttttattattattattataagtttttaggggttttagttatttgtattttttcgaggatttatatattaggtaatgtttgttagtttagagagtttttttaattgggaattgtagagtattttttaagatagagtgtagtaagttggtattttcgtgtttaggaggtatatggtttttattttttttatattagagtttcgtagaagggaattatttttttcggatattttttattttcggttttgtatagagatagcggagtaatatagttttgttttattagaggagttattcgggagagttttagatgtttttttttcgttatgggtttttggggaagatgttatttgggtggggtgggggtaggttgttgtttaaaagtgtatttatatttttttttttattgttcgtcgagtagggggacggggagtttaggttcgacgttattttttttcgttttcggttagggaattggtttagttgtttttgtcggcggtttgaggatttttatattggttcgagttattgtgcgggggaggggggagaaatatagaatagttagtgacgcgtattgttttttttttttatatttattcgtttttttcgttttttattttagttattttagtagggtattcgaatcgtttaggttgaatttagttttatatttttcgggggtagttcggaagtcggtttttcggtaggcgtttttacggagcgagggagcgacgttttcgagggtaggttggtgtaagcgcggggaggggagacgcggggttggatcgagcggggtgtgacgggggagggggttcgagtggtagcggcgcgggggggttaggggaggtcgtaggcggcgaggcgttcggggatataaggttatttgggggtgggggggcgtttttttgcgttcggggaggggttagtttttagatagggtagttttttaaaggttgttttttgggataatttaggttttttttaagagttgcggggacgagggggcgtggaggttcgggcgttgcggggggtcggaggtagggacgcggggggcgaaagcgttttatcgggaagggggtcgggttacgtgtttcggggggtaagtgattaaagggcgagggggtgggcgtcgggtattgtgggagattaagtcggaggcggggggtcgcggggagtaagatttcggtagggttagggcgggggttggggaggaggtcgggcgttttgtagggttaggaaaggaagggtcggtttttttgggtaaggggcggttcgcgggttcggagacgtttgaggaaggggcgggtgacgggatgattttcggggttggtagggtcgtgaggggcgtttttttgggaatttcgcgttttttttatttcggagtcgtcgtaggtcgcgttgggttcggttcggtgttattttcgtttcggttttttttcgtcgcggtcgaaggggggaaaatggtttcggttttagcgtcgttttttaaagggtttgaaatatcggtcgggaaattttatcgtataggtttcgtttttttacggatagtttataataattttaattaattttaattttttttttttattatcgttatttttttttttaggtttttcgggtaattttcgttttttcgtcgtttaggtaattattggttacgttttttttngagcgggcgcgcgcgcgttatttgggtaatcgtttattttttggttattttataatatatacggatatttttttttttaatatatatatatatatatatatatatatatatatatatatatataatatatatatattttgtttttttatattttatatatatatgttagagattgttgatattttaaaatattgtagattttttgtaattaatttttttagatattttataatagatattttttgttaattttttttttatttttggatttaatgttaatattttataataatttattatttttttttttttatggttattttataataagtatttttcgtagtatttatgttttatattttataatatttagttttattttttatagatattttataataattattttttatttatttttagtttgatattttataatagttagaaatttatttttttttatattataataacggatattcggtttttttttatatatatttcgtaataattagttttttattttttatattgatattttataataattaattttttagagttgtttttagtttttgtaggttagggtttagaggtttatattatttttagtttttttttttttagttttatagtttatagtaagtattttttttttattaaaaagataatttataatgattaatagttttattgtcgttttatagatggatatttaatttttttttttttaatattggaaagttattttataataattttatttttttatttatattttgatattttataataattgtaaggagttcgtggttaattaaatatattataatatttttaatataatttagtgttatattttataatgttttatttttattttattatttttatatttttcgagttaggtattttataatatttatattttttttatttttatttttaggcgttgttagtttattttaatatttagagtagggagggttaggtaggttatttacgtttttttgttttcgtttttatttgtatatattttaatttttttttgggttaaagtagtattttggtaaaaagttttttgatgtttgggattttagttttttttatattattatttttagatattcgggggttgggagtttatttagggttttatttagttttattaaaatttaggtattttttagatgtttatttttagtttttaagttttgaggaatattaattaattaaaatattaagttgatagatgaaatatttatatgaagtttaatttattttatagtattttataataattattaatttttatttaaagattattttttaatattttagtaatttttttttttattatatttttaggttagggattttttattaatatttttaggttatttttggggatggatattttattacgatgtgaatttaggtttttgttttatatatattaagagtgaaggtttgttttttcgttatttattattatttatgtttatttaatttgtgttgatagagtatttagtaaggtcgagtttcgtattatggagaattaaggaagattagggggtttttttttaaaaagtataagtaattaagtaaattatgatatacgatagaatggtgttaagggagaattgttgagtattgttttttaattttttgttatagaaaataaaattttattggttttaagagagaatatattttaataagatttatcgtggtttttttagaggttggaagatgatatttaaaggatttatgggtatagattatagttaatatgattttttatttgttttttatttattaggggattttttttggaaagtaatgtttatttatttagtatttttaatattgaaattttataatatgtttatgttttttttttttaagagattttataatatattagtattgttttttttatttttgaatattaaattttgtttatttttaatgttttatattttttaggtatttttttattttatattttgaagttttatagtatttttaatggtttttatttttattttgttggggttatattttttattttaaaaaaaaaaaaatttttagttgtataatgttttttatttttttttgtttgtatagaagttaatattttagcggggtatggtggtttatgtttgtaattttagtattttgggaggttaaggtaggtggattataaggttaggagtttaagattagtttggttaaaatggtgaaatttcgtttttattaaatatataaaaattagtttgatatggtggtacgtgtttgtaattttagttatttaagggttgaggtaggagaattgtttgaatttaggaggtagaggttgtagggagttgagattgtattattgtattatagtttgggtaatagagtaagattttgttttagaaaaaaaaaaaaaaaaaaagaagttagtagtttaggaaattttttatattgaattatgttttaaggtagttttttagcgtatattattttttttttttattatgtatattttttagttattttatggatttaattttagaagttgaaataatcgaattttttttgttttgttttttgtttttttgagagatagggttttagtggcgtaattatagtttattgtaattttaattttttgggtttaagtgattattttattttagttttttatttgtagttggaattacgggtatatattattatatttagttaatttttaaatttattgtagagacggggttttattatgttgttaggttgattttgaatttttggatttaagtgatttttttattttaggaaagagtttaatttttttttttttttttttttttgagacggagtttcgtttttgttgtttaggttggagtgttatggcgcgatttcggtttattgtaattttagttttttaggtttaagtgatttttttgttttagtttttcgggtagttgggattataggtatgtgttattatgttcggttaattttgtatttttagtagagacggggtttttttatattggttaggttggtttcgaacgtttaaatttaggtgattcgttcgtttcggttttttaaagtgttgggattataggcgtgagttattgcgtttggttaggaaagagtttaattttaaaattttttggtttttagaaaatttaatttattagtttgttatttttttttttttttgatttttagagatttaggatttgagtgaaaattaatgttttagtattattgttttgttgttttaattttaggttaaggataatgtttttttttgtttatgtattttttttgtatgggtttaagatttatggaagtgggacgagttgaaaagaaatttggatttttttgtagaaagggttttttattaattagtagtgagtgggatgaattttatgttatttttgtattattttttttattttatttttttagaggaaggtttggttagatggttttttttttttttaggatttaagggattggagaattggtataaagaaatgagtttagggaaggtaagagtttgttttagggaattataatttttttgtttttgagtagagtattagggatgtagataagtttttcgttagtttttggttgattttgtagatttattagtattttatatttaattttttttattttaggattggagtttttggtattaaagatattaggttttgttaaaagttttttgttatttttgaagtaggtgttttttttttttaattttttttttagttttttggtttatttttttgttgtatttattgtggtaagcgggttattttttttcgttttgtaaggtttttagtttttttcgtta

SEQ ID NO: 81 - DNA, 5476 bp, Artificial Sequence
  chemically treated genomic DNA (Homo sapiens)
ttgtttttatgtttgagggaaaaaaagttgagatattgtatgaaagatgatgtaggatatacgttgattttttggttttaatgagttatttgaatattgttttgtttattgttagttttttttattatttattatatggttaatttttgaatttttgtaatatgaaattttattttattttttaatttattgttatttaaagttagtaagtttagattatatggttatttaaaaaaaaaaaaaaaaagaaaagaaaaagaaattttttatagttttatttattaaataagtaaattttaataataagtatttgtgttttggtaatttatagtggatgtttagaaaagtaatatataaagagaaatgtttatgttatttgtttagttatgggatgtgtgtgtttgtcgagtatttttttaatttggaatttggtagaatatcgttatttttattgttttatttttttacgtcgatttttatagtaattgtttgtttagtgattgttataatttagtttggtagagagagggaagatattttataaagtaaggtaacgttaatgttgagattatgaatggttttgagtagagtagagtattattgttttttttaaaatttagaaggatttgatggtgttttgtgagtttatgggggtgttttcgtgtaggttggaaattatagttgtgcgtttttttcgtttttttttttgattagtagaagggtattttttttggtttgtacgtcgttgggttatataatattggttgtcgttgtataaagttacggttattagcgtttttttgaggttatttgtttttagttatggtgtttataggattttttttttattttgtaattttagttaaattagagtatgtgatttggtttagatgttaatataattgttgttatgtgtttttttttttttttgtgtttgtgataggtttaatttaatttgagaaggttgtagattttcggggttggtgtaaaaatattttattttgatttgagaaggcggttagttttttttttcgttgtcgttggttgttagtatttattttttgtggatgtgaaaattttagaagggttgggttttttttttgggtattttttaggtttatttttagagtggggtttagtatgggaggattgtattttatttatttttttgatgtggggtttggatttatagttcgatagtatttatggaatgtgggtagaagcgatagtagttagtttcgttttggttttagggcggtacgtgttttgtttgtgttttgggagtttttattttttatattgtgggaagagggtgtttagggagttgtagtttttttagtttagttttaggacgaggtttaggtagtagagttattttagtagatttggtagtgtgagagaaatgtatgtgtatatattgagtttgtaggtggttgttatatggtagtattgattgatatagatagaaaagagatttacgagggagaagtgagagtgttggagattttataagttataggttgtaggggtaggatggttttttagaaggtgaaatgattgttttgggaatttattagaggaagatatagaggttttagacggttgaaggtttaatagtgattttagacgggttttatgttagattaggtttttttagggttgtgttgtttttattaaagttcgttttgagggtagttatatagtaggtagtattcgttatttgtataagcgaggtttaagttttagttttttttttggtaggtagaggaagtaggggtattatgtttgggagtttttgaaagtagatggggtagtatttggttaagagttaggaggggatgatagattagaggggaattttcgttttacgtgttgagtatacgtagggggttgggtatttgttttgtgagttataattggtgtttttgtgtttcgtcggaagttgtattaggtagttttttggtggaggatagtggtcgttttttagttttattttttttttcgtgatgggtcgttgttagatgtgtgtttaggaaaggtaaatattaaaggtagaggattagtttttatatcgaatatttcggtggttttgtttgggggttgggttttgacgtgttggaggttgttttagatttagagattaaaaatagggaagaattattgttgaaatttttggaaaagtttgtaatggggtttttggtagtttgaggagtggtggtgtttttatttggtagacgtcgttttaataggagggatagatgagtgtattagtgttgttagttagaggcgtttgttggcgtgtttttatggaatggggtgttagttttgtggagggtggtttatttttttgtttttagtttttattgggtttgttttttgttttatggttagttggttagatcgagtatttttttgattttcgattttggtttttgttgatttttgtcgttgaggttttttgtagattttatttgtatttattttttgtagtttttatatttgaatttcgtttggatttttgttaagttttttaggttttttttttttagggggattatagatgttacgtgtagggttgtttttggagggttagtatagttttttttaagtgggtaagatttaggggtggtttaaaagatagttgtgttttagttttggaatttttgaatgttgatttttgtagtaaaaaaggatttgtagatgtgagtaaaggttgttgagataaggatattttttttgttttttgggaggattttaaatgtaggtgtatagattttaagaagaagaggtagagattggggtgatgtagttataattaaggaaagttaaggattgttggtagtttgtagaaattggagggtaaggagtattttttaatcgttcggagtttttaggaggcgtaaggttttattgattttttgattttagacgtttagttttcggaattttgagaggatttatttttgttattttaagtaattaaatttgtggtagttttattagttttaggaaatgaatacgaatggaaagttaaagattttaagaaatgagtggcggggtgcggtggtttatatttgtaattttagtatttgcgggaagattgtttgggtttaggatttggagattttgtgtttgtgagaaatttaaaaaataggttgggtgcgatggtttacgtttgtaattttagtattttgggaggtcgaggtaggcggattataaggttacgagtttgagattagtgtgattaatatggtgaaattttgtttttattaaaaatataaaaattagtcgggtgtggtggtgcgtgtttgtaattttagttattcgggaggttgaggtagaagaattgtttgaatttaggaagtagaggttgtagtgagtcgagatagtattattgtattttaggttgggtagtagagtaagatttcgttttaaaaaaaaaaaaaaaaaaaaaaaaaaaaaaaaaaattgagtatggtagtatgtatttgtggttttggttacgtcggaggattgtttgaagttaggagtttaagattagtttggataaaagagtaagattttatttttattaaaaaaatttaaaaattagttaggtatggtgtcgtatttatagttttagttatttaggaggttgaggagggaggattatttgagttttggcggttgaggttataatgagttatgattgtgttattgtattttagttttggtaatatagtgtgagattttgttttaaaaataataaaaatttaaaataaaagaattaagaaattattggatttgaggtttggtttttagttgttgttttgtttttgtgatttggttattcgggattttttgggtttaaatatatagtttattgtttattttaagaaggttttttattgtttggttggtaattggggtgggttttgtaggttttatttgttttggttttacggcgttggtgttgtaggtttttattattgtttgtttcgagttttttagttttttgtagagttgtttgtatttgatggcgatgaattaggaaggtaggcgtgttttgggttatagagtagttatggttgttagttattagggggttttatttgtaattttggatgtggttttggtttttttgtttaaagtgattttggggtttttagataagagatagggagattggagtttagttttattttttcgtatatatttggtttatttttgttttattttggaagatgggggttattatacgtgtaagggatacgggataggaatttttggttttgttattagatattttaaaattaagtgtaaacgtgattattaggtgtagtttttatagtagtaagaaatttgtgtttatagaaagaaatacgtgttagtaatttatttatgcggaaagttatatagagttattgttttttgtatttttaggtgacggtttatatttgttttagggaaggttatagttgtttgaatttttaaaatttttagatacgtattgtttgtgtaggattcggagtttagtagtattgttagggttttgaagtgtttttttagagatttttttttatagattatttttttttttttaagtagtaaaaggagaaaattgttattaaaggatattttagatttttgatagtattttcgttatttttgaggatattattattattttaggtgagtattaggtggagtgtttttgggtgattggtcggtttggagtagggagggaggtttagagttttattttttagtagcgagtgaggcggaggttttagcgtttttttcgggcgggttttttggtggatggaggagtgattcggggttttttacgtggtgttagttgtttggttttttggacgttgtaggaaagggtttttttcgtttgcgtttttttgattttgagttttattagtttttgttagttgggttttagaaggttggagtgttgtggtagggatgacgttttatttttgttatgtttttgtgttttgtgtttttttaggatgaggggtatgaagttgttgggggcgttgttggtattggcggttttattgtagggggtcgtgtttttgaagatcgtagtttttaatatttagatatttggggagattaagatgtttaatgttattttcgttagttatattgtgtaggtgaggttagggtagtttttttttaaaagtagaggagttttggagtttagggttggtgggtagggttagttttatggagttatagggtgtcgggtgtggggtattgagtattattgtttttagtacggtggaataggtttttggttgtggattaaggtttttatttttgttgtgttgtttttggttggtagtaggagtttaggtagaaatatgaggttgcggttaaatcgagtaatgttacgagtattagttgtggttttttttgtggcgttgtagggtttttgggtggtattagttttgtttagtattattgtggttttgtttttaga

SEQ ID NO: 82 - DNA, 5476 bp, Artificial Sequence
  chemically treated genomic DNA (Homo sapiens)
tttgggggtagggttatagtggtgttgagtagggttggtgttatttagggattttatagcgttataaagggagttatagttgatgttcgtggtattgttcggtttaatcgtagttttatgtttttgtttgggtttttgttgttagttagggatagtatagtagggatgaggattttggtttatagttaagagtttgttttatcgtgttgggagtagtggtgtttagtattttatattcgatattttgtggttttatagggttggttttgtttattagttttagattttagagtttttttgtttttggggggaggttgttttggttttatttgtataatgtagttgacgagggtggtattggatattttggtttttttaaatgtttggatgttgaaggttgcgatttttagggatacggttttttgtagtagggtcgttagtgttagtagcgtttttagtagttttatgttttttattttgggagagtatagggtatagagatataatagaagtgagacgttatttttgttatagtattttagttttttggagtttagttggtaggggttggtggagtttaaggttagggggacgtaggcgggggaaatttttttttataacgtttagaaagttaaatagttggtattacgtagaggatttcgagttatttttttatttattagaaaattcgttcgggagggacgttggagttttcgttttattcgttgttggaggatgagattttaagtttttttttttgttttaaatcggttagttatttagaggtattttatttggtgtttatttgagatgatggtgatgtttttagagatgacgagaatgttgttaagaatttggaatattttttgatgataattttttttttttgttgtttaaagaaaaaaaagtagtttatgaagaaaggtttttgaagaagtattttaaggttttggtagtgttgttgggtttcggattttgtataggtagtgcgtgtttgggagttttaaaagtttaggtagttgtgattttttttggggtaaatgtgagtcgttatttgagagtgtagaaaataatggttttgtgtggtttttcgtataggtgggttgttagtacgtgtttttttttgtaagtataggttttttgttgttgtaaaaattgtatttgataattacgtttgtatttagttttaaaatgtttgataataaggttaaaggtttttatttcgtgttttttgtacgtgtggtggtttttattttttaggatagggtagggatgggttaggtatgtgcgggagggtggggttgggttttagtttttttgttttttgtttgggggttttaaggttattttggataaagaggttaaagttatatttaaagttgtaaatggagttttttggtggttgatagttatgattgttttgtggtttaggatacgtttgtttttttgatttatcgttattaggtgtaggtaattttgtaggaggttggggagttcggaataagtagtggtgggggtttgtagtattagcgtcgtggggttaggataggtggggtttgtaaagtttattttaattgttagttaagtagtggggagtttttttgaggtagataataggttgtgtgtttaggtttaggggatttcgagtgattaggttataagggtagggtagtagttaaaggttaggttttaggtttagtaattttttggtttttttgttttgggtttttattgtttttgagatagggttttatattgtgttgttaaggttggagtgtagtggtataattatggtttattatagttttaatcgttagggtttagataattttttttttttagttttttgagtagttaagattatgggtacggtattatgtttggttaatttttaaatttttttggtagagatggggttttgtttttttgtttagattggttttgaatttttggttttaggtaatttttcggcgtagttaggattataggtgtatgttattatgtttagtttttttttttttttttttttttttttttttttttgaggcggaattttgttttgttgtttagtttggagtgtagtaatattatttcggtttattgtaatttttgttttttgggtttaagtaatttttttgttttagtttttcgagtagttgggattataggtacgtattattatattcggttaatttttgtatttttagtagagatagggttttattatgttggttatattggttttaaattcgtgattttgtgattcgtttgtttcggttttttaaagtgttgggattataggcgtgagttatcgtatttagtttattttttaagttttttatagatataaggtttttaagttttgagtttaagtaattttttcgtaaatgttgggattataagtgtgagttatcgtatttcgttatttattttttggaatttttgattttttattcgtatttattttttgagattggtgaaattattataagtttggttgtttaaaataatagaaatggatttttttaaaatttcggagattggacgtttgaagttagggagttagtaggattttgcgttttttggaggtttcgggcggttgggggatgttttttgttttttagtttttgtaggttgttagtaatttttggttttttttagttgtggttgtattattttagtttttgttttttttttttaagatttgtgtatttgtatttggggtttttttagagagtagggaggatgtttttattttaatagtttttatttatatttgtaagtttttttttgttataaaaattaatatttagaggttttagggttagggtatagttattttttgagttatttttgggttttgtttatttggaaggggttgtgttggttttttaaggatagttttgtacgtagtatttgtggtttttttgggggaggagggtttggaaggtttggtagaagtttaggcgggatttaggtatgagaattgtaggaaatgaatataaatggggtttgtaggaggttttaacggtaagagttagtaggggttaaggtcgaaagttaggaaagtgttcggtttggttagttggttatgaagtagaaggtaggtttagtggggattagaaataggaaggtaaattattttttataagattggtattttattttataaagatacgttaatagacgtttttggttggtagtattggtgtatttatttgttttttttattgagacggcgtttattagatggaaatattattattttttaggttgttagaggttttattgtaggtttttttaaaggttttagtaatggtttttttttgtttttaatttttaagtttaggatagtttttagtacgttaaaatttagtttttaagtaaggttatcggagtattcggtgtagggattagttttttgtttttggtgtttgttttttttggatatatatttgatagcgatttattacggggaagggagtaaagttagagggcggttattgttttttattaagaaattgtttggtgtagttttcggcggggtatagggatattaattatagtttatagagtaagtgtttaattttttacgtgtgtttagtacgtgggacgagggtttttttttggtttgttatttttttttggtttttgattaaatgttgttttatttgtttttaggaatttttaggtatagtgtttttgttttttttatttgttagaaggaaggttggaatttgggtttcgtttgtataaatggcgagtgttgtttgttgtgtggttgtttttaggacgggttttggtgagggtagtatagttttggaggagtttggtttgatatggggttcgtttgggattattgttgggtttttaatcgtttggagtttttatgtttttttttgatagatttttagaataattattttattttttaagaagttattttgtttttgtagtttgtggtttgtggagtttttagtatttttatttttttttcgtggattttttttttgtttgtgttagttaatgttgttatgtaatagttatttgtaaatttagtgtatatatatgtattttttttatattgttaggtttgttggggtggttttgttgtttgggtttcgttttggggttgggttggagagattgtagttttttgggtattttttttttatagtgtggaaggtggaggtttttagggtataagtagaatacgtgtcgttttaaggttaaggcggagttggttgttgtcgtttttgtttatattttatgggtgttgtcgagttgtaggtttaagttttatattaggggagtgagtggggtataatttttttatgttgggttttattttggagataggtttggggaatgtttaagaaggaagtttagtttttttgggatttttatatttatagagaatgggtgttggtagttaacggtaacgaggagaaaagttgatcgtttttttagattaggatgaggtgtttttatattaatttcgaggatttgtagtttttttaggttaaattaaatttgttatagatataggaagggaaaagagtatataataataattatattgatatttaagttaggttatatgttttgatttggttgaaattataggataaaggaaaaattttataggtattatggttggaaataaatggttttaaaggaacgttggtggtcgtggttttgtgtaacgatagttagtgttgtgtgatttagcgacgtgtaggttagggagggtatttttttattgattaagagggaaagcgggaaggacgtatagttgtggtttttaatttgtacggaggtatttttatgaatttatagagtattattagatttttttgaattttgaaggaagtaatgatattttgttttgtttaaggttatttatggttttaatattaacgttattttgttttatagggtattttttttttttttgttaggttgggttgtggtagttattgaataagtaattattgtgaaggtcgacgtggaaaaatgaggtaatgagggtggcggtgttttattagattttaagttgaagaggtgttcgataggtatatatattttatgattaaataaataatatgaatatttttttttatgtattatttttttagatatttattataagttgttaggatataaatgtttattattggggtttatttatttaataaatggaattgtgggggattttttttttttttttttttttttttttttttgaatgattatataatttggatttattaattttaggtaatagtaagttaaaagatagaataaggttttatattataggaatttaaaaattgattatataataaatgatgaagaaaattaataataaataggataatgtttaaatagtttattggggttaaaagattagcgtatattttgtattattttttatgtaatgttttagtttttttttttttaaatataaaggtag

SEQ ID NO: 83 - DNA, 7664 bp, Artificial Sequence
  chemically treated genomic DNA (Homo sapiens)
ttttaatttggtttcgttgatataggaattttacgatttttaaattatgtaggggttgagttttttttatgatgattttgtttttttttttattgggggaattttttttatgttttaaaattgtcgagttttattttatgtaataggatttttgggtttttttaatgggggtttatgtttttggattgcgggtttttagtttttaattggaaagtgatcgtttattgttttatggagtttatttggatatagtatagttttaaaatcgttagtagttggttttgtttttaagtttggggaggggttttttagtgtaggagttggggataggttggggatttaagttgtttgagggggttaattttggattaaagttgttttaagtttgtggtaaaagggttttagggaaggtaagtgggttatttgttggaagttgttagttgttcggttggtaatggtgtgagtgttttggttttgtttttgttttggggtttagtaggttattttttttttttttttttttttttggcgtttgtttttgtagttattgggttaatttttttttagttttaagttgtatatagggttttttagtgtaaatttttttgtttatatcgtgtatttttagaagtttgcgtgtgtatagagcgttttttattttttagttaatttttagtttttttttttgagtttggtatttgttatgtgttaattttgattttgaggtgggtagtgagggaagtagtttcgggtttgtttgttttttgttttcgaaatgttcgttttttttgaagtaaatatatatatataaataaatgtataaatattgttttgtatttgagtttgtttttttgtttttttttgggattggtttggtgggagaggagttatttataaggttagggttaattggaatttaaagttttttttgagaagtttggaatttttgagcgtttgaattagagggttaaatggatgttttatattttttatttttttagttttatattggggttaggagtggatttattagttttttttatggttatattttttttttttgcgtattcgttgttgtttatttgtattaaaagtagttattgaggagaaaagtttttttagggggagaagttgagtttggtgaggatgttttagtatagagaatggtggttatgtttatggtagggattggtttagggtagaatggatcgatgtgggtttttagagaagtttgttttagaaataatagaaaagggtaggtttagattttatttataggtaagttttaaattttaatgataaaatatcggtgttatataaattttattttttttaagtagattagtagtaggaattgtgaaaggtagatgagaaatgggaaagggaagagattggggaagtaatgtaggttttagtatttattatttttgtagaatgggttttagataggattgttatatatttgtatttattatgagtagtaggtgggatatttttagtaatagtaaaaaaaagtaatttataaaagtaggttttagtgaagttatttggttgttatttaaaagaggagaggggtattaaaataagattaatggttttttttttttttttttttttttgtatttttgtgtttttggggtaagggttattgagtatatatttttgaggatgagttattagagttgatttttagtggtttgtttggtggattgtttgtagtaagttttaagttttggattttgatttttttttagttagttgattttttagtagtttttttaagttattggggtttgatttttaagaatgtaaatgtatagttatgggatgtttgcgtttatatttttaggtggtatattttaaaggtagatcgaggttttgggttatgtgagtttagaattgagagttatatttggtttaaattcgtatgaggggtagggaaagaggtataaatgtttagtgtttttatttattttattgagtttgtttttattaattaaggggttatgttggtaagagttttaaggattttgttgatttgattttggggaggtttttttgggttgtgttttggaggtttacgtatttattttattgtagtttttatttttgggtgtttatacgtagatgttaatttagagtagtaggaagaggattttaaagtttatgaagagtgaggttattaaggagatgaggagttttttatagatattacgagtgtatttggtagaggtgatttcgtaattgggtatagtagttaaggtaaagcgaaggggtggattgtggagtgtagagagtttagtttacggtaatttgaggagaaaagtattggtttaatgttttttgggaggtttatttggtttagagtagttaggtagaggggtttaagagatgttttggattttggtgttttattgttatgaagaaaatgagatttagaggagttaggttatttgttttaggttatatagtttatgagggtcggagttgggattagtttttagattttttgatatttgagtgtatttttttttatattatttttttaattgtagtatttttattttttatttttattttagttaggttttttgtttattgttttggaaatttaaagaataaattgagtttatttgaatttgggaaataaggttataatttgtttttgggtattattagttttttttttttttttatttttttttagttttaatttaatgtataaaatcggcggggtttatgtatttagcgtggtttttttttgagttttttatattattaatgttggttttttggttgtttagtgaaaggatatacgaagaattaggcggtgaagaatatgttaatggttaaaagtattacggttagatgggggaagatagttgggtttattgggttggtatatttgtttatggtttcgagtttttagaggagggaaagagattagagttattaaagaattttacgattttagtttggagagaatatgcggttattaaggagtttggtgttgtcgtgaaatagaggttgattttagttcggaaatgtagttgtagattaatggtttttattagtattttttgaggttaataatttgattattatgaaaacgtgattaaaggtacgaattttttgtttgagaaaaattatatataagaaaaagtttgtttataattttcggagttttgtggattagtgtttatagatattaagttgagaattttcgttataagttattgattggtggtatttagattttaatattttttttttttgacggagttttattttttggacggcgttttattttgtcgttcgggttggagggtagtggtacgatttcggtttattgtaatttttgtttttcgggttttagagatttttatattttagtttttcgagtagttgggattataggattataggtgcgtattattatatttaatttttgtatttttagtagagatggggttttgttatgttggttaggatggttttgaatttttgattttaggtgatttgtttgtttcggttttttaaagtattgagattataggtgtgagttgtcgcgtttaggtttaatttttttttttttttagatagttttgttttatcgtttaggttggagtgtttggagtgtagtggtgttaattcggtttattgtaagtttcgttttttgggtttaagtgattattttgttttagtttttcgagtagttgggattataggcgtgaattattatgttcggttaattttttgtatttttaggagagatagggttttattttgttggttaggttggttttgaatttttgattttttgattcgttcgttttagttttttaaagtgttgggattataggagtgaattatcgcgtttggtttttaatttttaatttagtattttttttattatttatgttattatggaattttgtgagttatggttaagatatttaagttttggttttgagtaatttgagtttgagtaaagcgattgtaatatttattttatagaattgaaaaataagaaagatgatgaattaaagtatttagtgtttagtagggagtattttgtttaataggtatttgttttttttttaaggttgtagggaagatgatgagataatgttttttatgaaagagggttgtaaacgtaaagatttgtataaatgttaattttattgttatcggttagttaatgtttttaaaatttagaatataataattttagagaagtaaattgtttttattgttttgagatattggaatttaatttagtaaataattacggttttttttttttaaaatgataaagataattattgttatttattgagtttttaattacgggttttttgtttggtattgagaatataaagatgaatagatattattttagagttagatgcgcgttagacggtggttattaggaggcgtggtcgaaaataaagaagtttatggaacgtggttagagatttgtatagaggttgtgggcgtttttaggaaagtttggttaagtgtttgagagttggaagtgttttattaataaatatttgtttagggtattgtaggatgggtacgggttcggtagaagaattttttaaataaagataatatattatcgataatagagatatataaattggaaggtatttaaaattcgttttacgtttttcgtttttagaaatcgcgagttgagaaatttaaggagtttatggtaaggggttttttttttttttattttttagtttaagtcggaggttttaggagcgtttagttttttggattttcggcgtttgaggagataagcgcggtgtgggttagatttcgaggggttttcgtattttcgtttggaattttttttaacgtttttattattttgtttcgcgaaggttaattcgtcgtttcgttatcggaagaatacgtcgataggagtaggcgtttagtataatcggaaaaggaagtgttttcggcgtaagtggtattgagggatttgtagttttgcgatttcgggtgtagagggagtaggggtttgcggggatttggtgtgggtggagtggggataagcggtggagaagggtacgttagggtcgttgagagattttgttttttttggagggattggttgttatgagagtagtcgtttgaggggacgtagtttgtattacgcgttttaagaggttgtgcgtggcgagtaggttacgtgacgggagcgcgggttttggaaggcggttgaacgttaggttattcgtcgttaagttgagaagggagagcgagtttaggatcgtttgttcggggtaatttcgaattaagttttagtcgtcgaggtcgcgtgttttaaaggttaggtgagattttatgggaagcgttttcgggagcgacggggttcgtttggcgttgggggtcgtggggagtcggggtttggagtgcgcgggattcgtagttaagaggtttcgttatttttttttttgtgagttttgggttagtcgcgtaagtttcgagttttttttttttttattgtagaaaagcggtaataagttttattttatggggtcgtgttgtattttttttaagattttggacgagaaatatttttgatatttgagttgtttaggttttttttttgtttatttgtttgtgggacgtcgtgaggggattaagggttatatggtttggtttttagtttatattttagtagcgcggtcggtttgaggtaagagtcgaagggttgaataggtttggagaggggatattagaggtttttgtttgttgttttagttaattttggtagtagttttgagagataggtatggtaatcgttttttttttgtagacgagaaaataaattttagtggtttggtaatgttatacggatggtaaatgtcgcgtttagatttaaggttagagtttttgtcgttgtagtttataggggaattatttatattaattaaatgaataatttattgttaattaattattaattgattaataatttagggatggatttggaaggacgcgtgagaggatggcgagaggagggtatagttaaggaaaagtgggaaaaggcgggttttattttagttttttgttgagattttagaatgtagggttaggttgggaattagaatatgaaagatcgtgatgttatgttgaagtgtttggattgaattagaaggaagaattgaatagttattgatgttttagaaagaattttgtgaagaaagagtgggaataatgaaaaggtttgatggagtttttcgttttttttttttttttttttttgtttttttttttttttttgatagggttttgttttgttgtttaggttggagtgtggtggtataattatagtttattgtagtttggaatttttgggtttatgtgatttttttattacggttttttaaagtgttgggattattgtttagagtttttgtgtttggttttagtagaatattttttggagtattggatatatattaatagtgggtataagatgagttttttatttttttgagacggagttttatttttttgttaggttggagtgtagcggtataatttcggtttattgtattttttgttttttgggtttaagcgatttttttgttttagtttttcgagtagttgggattataggtgtatattattatatttagttaattttttttttttttgtatttttagtagagatagggttttatcgtgttggttaggatggtaagatgattttaaattgtattttttaaaaattttttttaatagttatatatttaatatatattaaaatataattaatagaatataaatattattgtttatgagttttttagtttagttttttaaaaaaaattttaagtgaatgaaagtacgggttttagttggaagtagtaaaaatcgtgagggtgatttgggaaatattgttatttgggaaatattgaattttgaagtgtaatatttttttgagtttagtgattatagtatgttagatttttaaattaggatttggggaggagttatggagttaatattttagattgagtggtggcgagaaaacgtaaagggaaagatttgaaattttagtaatattataataaaagtagaaatttttatgtgttgaggcgatgatgaagagagtttagagaagtttgtgagaaagttatattatttttatttagatatgtttgtaatttttttttaaggttgttttattagttagggttttttagagatttaaaataaattagatttgtttgtttagttggtgtatttgtttgttttttaggtttgttattatggtttttggattttttaagttaggttaagtattttggttttttgtggtttttgatggagatttatgttgtaggttttttttgtgtaataaataatgttgttattttagaatattaatagtattttatttttttaagtacgtggtttaatttttggtattcgttgagttttattattgagtaaatttttttgttagattgagttttttgagaatggggattttgtttatttttttatttttagtagtgttgatatggtgttttttttgttgtgtggaatttagttgaaggtatgaagttggtgagataatattagttataattttttttttttttttcgtttttgatttgttttttttttttagt

SEQ ID NO: 84 - DNA, 7664 bp, Artificial Sequence
  chemically treated genomic DNA (Homo sapiens)
attaaaaaagaaaggtaagttagagacggaggaaaggagaaaggttataattggtgttattttattaattttatgtttttaattaaattttatataataaaaaggatattatgttagtattgttaaagataaaaagatgaataaggtttttatttttaaaaaatttagtttagtaggagaatttatttaatagtaaggtttaacgagtattagaaattgaattacgtgtttagagaaataagatattgttgatattttaaggtagtagtattatttattatataaaaaaaatttgtaatataggtttttattaaggattatagaaggttaggatgtttggtttggtttgaggagtttagggattataatggtagatttgaaagataggtaaatatattagttaaataaatagatttgatttgttttgagtttttggagaattttgattaataaggtagttttgaaaaaggattgtaaatatatttgaatggaggtgatgtggtttttttataagtttttttaaattttttttattatcgttttagtatataagagtttttatttttattataatgttgttagagttttaagtttttttttttgcgttttttcgttattatttagtttgaaatgttaattttatggtttttttttaggttttgatttaggggtttggtatgttgtagttattgggtttaaaagagtattgtattttagagtttagtgttttttagatagtagtgttttttaaattatttttacgatttttgttatttttaattaaaattcgtatttttatttatttagaattttttttaaaaaattaaattggaaaatttataagtaataatatttgtgttttattagttatattttaatatgtattaaatgtataattattaagaaggatttttagggggtgtaatttaaaattattttgttattttggttaatacggtgaaattttgtttttattaaaaatataaaaaaaaaaaaaattagttgggtgtggtggtgtgtatttgtaattttagttattcgggaggttgaggtaggagaatcgtttgaatttaggaggtagagaatgtagtgagtcgagattgtgtcgttgtattttagtttagtaagagagtgagatttcgttttaaaaaaataaaaaatttattttgtgtttattgttggtatgtgtttaatattttaagaaatattttattggggttaggtatagaggttttgggtagtaattttagtattttgggaggtcgtggtgggaggattatatgagtttaggagttttaggttatagtgagttatgattgtgttattatattttagtttgggtaatagagtaagattttgttaagaaaagaaaagaagataaaagaaaagagaaagaagaaacgaaagattttattaggtttttttattgtttttattttttttttatagggttttttttagagtattaatgattgtttaatttttttttttaatttagtttaaatattttagtatggtattacgattttttatgttttggtttttaatttaattttatattttgggattttaatagaaagttggaataaggttcgtttttttttatttttttttagttgtgtttttttttcgttatttttttacgcgtttttttaggtttatttttggattattaattaattaataattaattgataatgaattatttatttgattaatatgaataatttttttgtgaattgtagcggtaaaagttttggttttgaatttaggcgcggtatttattattcgtgtgatattattaagttattgaggtttattttttcgtttatagaagaagaacgattattatgtttgttttttagggttgttgttagggttaattgagataatagatagaaatttttaatgttttttttttaggtttgtttaatttttcggtttttgttttaagtcggtcgcgttgttggagtgtggattgaggattagattatgtagtttttgatttttttacggcgttttatagataggtaggtaggaaaggggtttaaataatttaagtgttagaaatgtttttcgtttaaggttttaggaaaaatataatacgattttataaggtggaatttattatcgtttttttataatggaggaaagagaggttcggagtttacgcgattggtttaaggtttatagggggaaaagtggcgggattttttgattgcgaatttcgcgtattttagatttcggttttttacggtttttagcgttaagcggatttcgtcgttttcggaggcgttttttatggggttttatttggtttttgggatacgcggtttcggcggttaaagtttggttcggggttgtttcgggtaggcggttttaagttcgttttttttttttagtttagcggcgggtggtttgacgtttagtcgttttttaaagttcgcgttttcgttacgtgatttgttcgttacgtatagttttttggggcgcgtagtgtaggttgcgtttttttagacggttgtttttatggtaattagtttttttagggagaatagagttttttagcgattttggcgtatttttttttatcgtttgtttttattttatttatattaggttttcgtaggtttttgttttttttatattcgaaatcgtaggattataagttttttaatgttatttgcgtcggaggtattttttttttcggttgtgttaggcgtttgtttttgtcgacgtgttttttcggtggcggagcggcggattagttttcgcggggtaaaatggtgagagcgttgaggggagttttagacggagatgcgaggatttttcggggtttgatttatatcgcgtttatttttttagacgtcggagatttagagggttagacgtttttggaattttcggtttgggttgaagggtggggaagggggaagttttttgttatgaattttttaggttttttagttcgcgatttttaagggcgagaggcgtggggcgaattttgaatattttttagtttgtatatttttgttatcggtggtgtgttatttttatttggaaagtttttttgtcgaattcgtgtttattttataatgttttgggtaaatgtttattggtgaagtatttttaatttttaggtatttggttagatttttttaggagcgtttatagtttttgtatagatttttggttacgttttatggatttttttgttttcggttacgttttttagtgattatcgtttgacgcgtatttagttttgggatgatgtttatttatttttgtatttttagtgttaaatagagggttcgtaattggaagtttaataaatggtagtgattgtttttattattttgggggaagggggtcgtgattgtttattgaattgaattttagtgttttagaataatgggggtagtttatttttttagagttgttatgttttggattttagaagtattggttgatcggtgataatgaagttaatatttgtatagatttttacgtttatagtttttttttataaaagatattattttattattttttttatagttttaggaaggaagtaaatatttgttgagtaaaatattttttgttaggtattagatgttttgatttattattttttttattttttagttttgtgaaatagatattatagtcgttttatttagatttagattatttagaattagaatttgaatgttttgattatagtttataagattttataatagtataggtagtgaggaaaatattgaattagaaattgagggttaggcgcggtggtttatttttgtaattttagtattttgggaggttgaggcgagcggattaggaggttagaagtttaagattagtttggttagtaaggtgaaattttgttttttttaaaaatataaaaaattagtcgggtatggtggtttacgtttgtaattttagttgttcgggaggttgaggtaggataattatttgaatttagaaggcggagtttgtagtgagtcgagttggtattattgtattttaggtattttagtttgggcgatagagtaagattgtttggaaaaaaaaaaaaattgagtttgggcgcggtaatttatatttgtaattttagtattttgggaggtcgaggtaggtagattatttgaggttaggaatttaagattattttggttagtatggtaaaattttatttttattaaaaatataaaaattagatgtggtggtgcgtatttgtaattttatagttttagttattcgagaggttgaggtatgagaatttttagaattcgggaggtagaggttgtagtgagtcgagatcgtgttattgttttttagttcgggcgatagagtgagacgtcgtttaaaaaatgagatttcgttaaaaaaaaaagatattgagatttgggtattattagttagtgatttatagcgggggtttttagtttggtgtttatagatattggtttataaagtttcggaaattgtaggtaaatttttttttgtatgtggttttttttaggtagagagttcgtatttttagttacgtttttatagtggttagattattggttttagaaaatgttaataagggttattgatttgtagttatattttcgggttaaaattagtttttgttttacggtagtattaggttttttgataatcgtatgttttttttaggttgaaatcgtgggattttttgatagttttgattttttttttttttttaggagttcgaggttatgagtagatatattagtttagtgaatttagttgtttttttttatttgatcgtggtgtttttggttattggtatgttttttatcgtttggtttttcgtgtatttttttattgagtagttagaggattagtattagtgatgtgggaagtttagggagaaattacgttaggtatatggatttcgtcggttttgtatattggattggggttgagagaaggtaaggaggagaggagggttggtgatgtttaggggtaggttatggttttattttttaagtttaggtgagtttagtttgttttttggatttttaggatagtgagtaggggatttggttggagtggaggtggggaataggggtgttatagttggaaaggtggtataaggaagggtgtatttaggtgttaggaggtttgagggttagttttagtttcggtttttatgagttgtgtgatttggggtaagtgatttaatttttttgggttttattttttttatggtagtggagtattagagtttaaggtattttttaggtttttttgtttggttgttttgagttagataggttttttagaaggtattgagttaatgtttttttttttagattgtcgtgggttgggttttttgtattttatagtttattttttcgttttgttttaattgttgtgtttagttacgaggttatttttattaagtatattcgtgatatttataaagagttttttatttttttagtggttttattttttatgggttttggagttttttttttgttgttttgggttggtatttacgtgtgagtatttaagggtaagagttgtaatgggatggatgcgtgagtttttaaggtatagtttagggaagtttttttagagttaggttagtagggtttttaaagtttttattagtatgattttttggttgatggagatagatttagtggaatgggtagggatattagatatttgtgtttttttttttgttttttatacggatttgagttaaatgtgatttttagttttgagtttatatggtttaaggtttcgatttgtttttgggatgtattatttagaagtgtggacgtaggtattttatggttgtatatttatatttttagaagttagattttagtgatttggagaggttgttgggaagttagttggttgaaagggggttaagatttagggtttaaaatttgttgtagataatttattaaataggttattaggaattagttttggtggtttatttttagaggtgtgtgtttaatagtttttgttttaggagtataggggtgtagggagagaaggaggaaagaagggttattggttttattttgatatttttttttttttttaggtaataattagatggttttattgaaatttgtttttgtaaattatttttttttattgttgttggaagtgttttatttgttgtttataataaatgtagatgtatagtagttttgtttggggtttattttgtaggggtggtgggtgttgggatttatattgtttttttaatttttttttttttttattttttatttgttttttatagtttttgttgttgatttatttaagggggatgagatttgtgtagtatcggtgttttgttattggaatttaaggtttatttgtggatagggtttgggtttatttttttttattgtttttaggataaatttttttgggaatttatatcggtttattttgttttaggttagtttttgttataaatatagttattattttttgtgttggggtatttttattaggtttagtttttttttttaagaaggtttttttttttagtggttatttttaatgtaggtgggtagtagcgggtgcgtaggaggggaaggtgtggttatgggagaggttgatgagtttatttttagttttaatatgaagttaagaggataaggggtatgaagtatttatttggttttttggtttaggcgtttagagattttaggttttttaggaagaattttgaattttaattggttttagttttataggtgattttttttttattagattaattttaagaagagataaggaggtaagtttagatataaagtagtatttatatatttatttatatatgtatatttattttagaagaaacgaatatttcggggataggaagtaagtaggttcggggttgttttttttattgtttattttagagttagagttggtatatgataaatattaagtttagggagaagaattgggagttaattgggaagtagggggcgttttatgtatacgtaggtttttaagggtgtacggtatgggtaggaggatttgtattgggaggttttatgtatagtttgaagttagggggagattagtttagtgattataggaataaacgttaaaggagagagaagaagggagggatgatttgttggattttagggtagggatagggttaagatatttatattattgttagtcgggtagttggtagtttttagtaggtggtttatttattttttttgaagtttttttattataggtttaaggtaattttggtttaaggttgatttttttaagtagtttggatttttagtttgtttttaatttttgtattgaggaatttttttttaggtttggaaatagagttagttgttaacggttttggggttgtgttgtgtttagatgggttttatggggtagtggacggttattttttagttaaggattgagggttcgtagtttaagaatatgaatttttattgaggaagtttaggaattttattatatggagtggggttcggtagttttaaggtatagggaggatttttttagtgggagggagaataaagttattataaggaaggtttagtttttgtatggtttgggaatcgtaaaatttttatgttaacggaattaaattgggg

SEQ ID NO: 85 - DNA, 11050 bp, Artificial Sequence
  chemically treated genomic DNA (Homo sapiens)
gattttggtttattataattttcgttttttgggtttaagcgatttttttgttttagttttttgagtagttgggattataggtatgcgttattatgtttggttaagtttttgtttttgtttttgtttttttttgagatagttggagtgtagtggttcgattttggtttattgtaagttttgtttttcgggtttacgttatttttttgttttagtttttcgaatagttgggattgtaggttttcgttattatatttggttaattttttgtatttttagtagtaatagggttttattttgttagttaggatggtttcgattttttgatttcgtgatttgttcgttttagtttattaaagtgttgggattataggcgtgagttattgtattcggtttttttttgtatttttagtagatacggggtttttttatgttggttaggttggtttcgaattgttgattttaggtgatttattcgttttagtttttgaaaagtgttaggattataggcgtgagttattatgttcggtttttttttttttgttgagatgtagttttgttttgtcgttcgggttggagtatagtggtgcgattttggtttattgttatttttattttttgggtttaagtaatttttttgttttagtttttcgagtagttagaattataggtgtgtgttattattttcggttaatttttatatttttggtagagatagggttttgttatgttggttaggttagttttaaatttttggttttaggtgatttgtttgttttggttttttaaagtgttgggattataggtatgagttatcgtgttcggtttatgtttattatttttattttaaggttggtaagaaggtaaggttcggtttgggtgttgggggggtgcggatttagagtttttggtttttagtttagggtatttttttgatgaaagatgatattatataagtatgattaaaagtatggaggtcgggtgtagtagtttacgtttgtaattttagtattttgggaggttgaagtaggtggattatttgaggttaggagttcgagattagtttggttaataagacgatagttcgtttttattaaaaatataaaaaattagttaggcgtggtggtgggtatttgtaattttagttatttaggaggtcgaggtagaagaatcgtttgaattcgggaggtagaggttgtagtgagttgagattatgttattgtattttagtttgggtaataagagcgaaattttatttttaaataaataaataaataaataagtatggagttaggttgggtgcggtggttaacgtttgtaattttagtattttgggtggtcgagataagaagatcgtttgggtttaagaatttaagatttagtttgggtaatatagtaagattttatatttataaaaaaatatatatgtataaaaaattagtcgggtatggtggcgtatatttgtggttttagttattttggaggttgagatgggaggattatttgagtttgggaggttggggttgtagtgagttgtgatttagttattgtattttattttgggtaatagagtaagattttgttttaaaaataaataaataaataaatagtttggagttttgtcgttagagtttaaattggattttttttttttttgtattatagttaaggggtattatagttaaggggttttatttttatgagttttagtttttttattaggaaaatgagataataaaagtttttattttatggggttgttgagaggatttagtaaattaatatttaaatataatagcgtttgatatagggtaaggtatttagtaaaaggtggttgtaatttgtattaaatttgttttattttagtgggggtatttagggaaggttataaatgtgttcggaggttaggtttagtggtttacgtttgtaattttattattttgggaggttgaggtaggtggattatttgaggttgggagttcgagattagtttggttaatatgataaattttgtttttattaaaattataaaaattagttgggcgtggtggtgggcgttagtttattttagtttggatgaaagagggaaattttattaaaaaaaaaaagtgtttggaaagtttggagttttaatgtgagttttggtaagtcgttttttttttttttttttagttaggtaattattaaattttagttttagggttttagtttaggtttggtatttttttttttttttttatttgggtttttggatgttttagtttttttaaggtttttaagtattatttttataggtagtttttttttttgtatagagtttttttagggttttttcgtgtttttaggaaagttttagtttttttgtacgattcgttttgttttgcgtgggttggttttgtcgtttttatagttttatgtttgttatttttttcggtaagttaaggatatatttgtagttttttgaatagaatatgtttttattttattttaggtttttgcgtaagttgtatatttttattatatagtatttgtacgatttgtttaatagtatttagggttttttttttttaagaagttttttttgattttttagtttgggttagatatttttttgggttttgttatgatagttttgattattttgggttgttattgtttggaaaggtggagggatttgttttttttattagattgggtatttgtttttttttttttttttttttttttttgagatagagttttgttttgttttttaggttggagtgtagtggcgtaattttggtttattgtaatttttgtttttagggtttaagcgattttttcgttttagtttttcgagtagttgggattatagttgtatgttattatatttggttaatttttgtatttttaatagagatgcggttttattatattggttaggtaggtttttaatttttgattttaggtgatttattcgtttcggttttttaaagtgttgggattatatgtatgagttaaagtattcggattggattgggtatttgtgaggatagttttttttattgttggaggtatattattatggaagagatttaggtgggggatttaagtagttagtttgtttgattttgaggatacgggaattttttttttattttaagagatttgtgaagtgtttagggtagagtttgggtggtgggtggggtatggagattttatcggtttttgtgtagttttagaagtttttttatattttttttgtttttggggatcgggtcggttttattaaaggttttttttaggagttggtttttttttaggtcgaagatatgacggggagtaggttttgtggtagcgggtggaggaggtagtgggagcggtgggggaataggggtttgttgattttagggaggggatggtaaagttgaaaagtttaggggatttgggggtagaggaggagatggaatgttgttggtttggggtataggggtttttggaggagaaattggtggttttaggggaggagagtatggagaagttattttggggtttataggaggtgttgagaggtttagaaagcggggagggaaggattttttaacggagaacggttttagggatggagattttaaaggtttaagagttgagttttagaatttggggattgagtagtgggtgtgaaaggattagggttaatatttgaaattacgggagtaggaattgcgaggttgatttaagttataaggtatttgacggttaatagggtggggtttttaaattcggaatcggatttgtggtatcggttgggttatttcgggagttttaggtggagagttagtaggagttaatttattttttggggttggatgtggaaatttatgagtgagtttgggatatgaaggtttagatttagagtgaggtgttttaaggatgcgatttagggatttagggttaaagattcggagaatttaggtttagtatttttttatattttaggttcgagttcggaatttttgagttgatttttgagttagaggttaagaggttaaaaaggatatttggtagggaaaatggtttagttgtggagaaggttttggaattagagtaataaaaaacgtttgtgggttggagaagatttagagattagaggtcggtgggcgtcgcgataattattggaaaaaggaaaggagttaggaagtaaagtgtattttttattttcggaaaatggcggttttcgtatattgttttttttatattacgtggtattatacgtaatagttttcgtttattttgcgattacgtgatagaaaacgtagttttggcgggggtaagaggcgggattttaaaaaggattgttttcggaagatatcgtagcgcgagacgcgtatagattcgtgatttttattgattggttcgtagattcgggcgttacggaaggaggtgggtttttagggagtggggcggggtttttttatttaggcgggaatttaaatatcgttttgattggtaatagttgagtttagaaacgagatttgttttgattggttaagttattgcgttttcgcgcggcgattggttggtagaaaggtagaggcggggttaggagagaaagttttgtggtttggttttagggaagtagtaggcgtcggttgagagaattacggttttgtcggaaggtaattttcggtgtaaacgattatcggcggtaggcgagcggtacgtttggcgttcgggtttttttgggttcgtttgaggaaatttgttgttcgaggttaggttgtttaggatttgttttttttttttatattggtttttatattcgggtttttttttcgggacggtttttcggatgtttgggttaatgggaatcgttatttagggtgtttcgtttatcgggtcgcgtagagtattttggaagtcgtagtaaatttttcgagagtttttttcgtacgcgggttggagaagcgggttttacgtacgttttgttgtcgcgttttgttttcgtttttgtttttattttcgttttatttgatttttttttcggaggaagatttttgagtagtcgacgttgggataaaggatttggagaaatttagggttaaagttacgtttttttttttttaagatttattttaatattttattttatggtagttttcgagattcgttttaattatattatttatattaataattttaatgagaagattaagaaggatggtgagttttcgggatagttcggagtttagattgtttcgtacgggttggtttttttttcgttttttgtattcgtttttttttttaagtgtttgtttagttaaatttcgagttaattttttggtttttatataaattattttttgtttttaatattttattagtttattttatattttgttttttaacgtggttattgttgtttattttataaggtttgaggttataggattttttttttaggaagttttgttttgtttttttacgtggttgtcgttgatttgtcgtacgttgagattattttttattaagttttgatttttttgagttgtcgtggggttttttttttttttagtggtttttgaatttcgtgagggtaaggattggggtttttttggttatcggtttttttagtgattagtttataatgaatatgtattataatggtggttaacgttttgtattatgggttggtttgtgtgtttttatataaattttgataatatttaatttttataataattttgtaggaagaaggttattgttatttttattcgttaattaagaaattggggtcgggcgcggtggtttatttttgtaattaattttagtattttgggaggtcgaggcgggcggattatttgaggtcgggagttcgagattagtttgatcgatatggagaaattttttttttattgaaaatataaaattagtcgggtatggtggcgtatgtttataattttagttattcgggaggttgaggtaggagaattgtttgaatttaggagacggaggttgtagtgagtcgagattgcgttattgaattatagtttgggtaataagagcgaaatttcgttttaaaaaaaaaagaaagaaaagaaaaagaaattgagataggggtgatgtgatttgtttagggttatatagtaagtaaagtggttgaggttattcgtatagaattttgtttaggaatttaatttttggtcgggcgtggtggtttaggtttgtaagtttaatattttgggaggttgaggtaggaggattattgaaatataggagtttaagattagtttaggcgataaagttagattttttttttataaaaaaaaaaaaaaaaaaaaaaaaggttgggcgtgggtggggtgcgtttgtggttttagttatttgggaggttgaagtgggaggatcgtttgagttagagaggttgaggttgtagtgagttatgattgtattattgtattgttgtttgggttgagtaagaatttatttgaaaaaaggaaaaaaaaaaagaatttaattattgaaatcggaaagatttttttatatttttaagtaaattattatttttattgaattttattttttagatttaaaaattgagtaaaattataatattttttttgtatggatgttgggggagattaaattagttaaattttgtagtattttttttttatggtaattggtagttagtaaagggttggataaatgttagtttttattattttaagaaaattatcgggagaatcgaaggagtttgttgggatttagtttgaggttattagtgaagttgttgttgaagaaagtaaaattagtagtcgggtattggtttacgtttgtaattttagtattttgggaggttgaggtgggtagattatttgaggttaggagtttaagattagtttggttaagatggtgaaatttcgtttttattgaaaatataaaaattagttggatgtggcggtgcgtatttatagttttagttattcgggaggttgagtaggagaattatttgaattttgggaagtagaggtcgtagtgagttgagatcgtattattgtattttagtttgggtgatagagattgttttaaaaaaaaaaaattaggagtgtaaattttgtatatgttttttttttttttttttttttttttttttgaggtagagttttattttgttatttaggttggagtgtagtggtacgattttggtttattataatttttgttttttaggtttaagcgatttttttgttttagtttttcgagtagttggaattataggtattcgttattacgtttggttaatttttatatttttagtagagacggggttttattatgttggttaggtttttttcgaatttttgattttaggtgattcgtttatttcggttttttaaagtgttgggattataggtgtgagttattatattcggtttgtatatgtttttagagtgtggtgtttaattattatcgggtagtgttggggatatattggtgatatagaattttggttttttgtttttaaattttattttatttatttatttatttttgagacggagtttttttttgtcgtttaggttggagtgtagtggtattatttttgtttattgtaagttttgttttgttttttgggtttacgttatttttttgttttagtttttcgagtagttgggattataggcgtttattagtatattcggttaattttttgtatatttagtagagaaggggtttaattatgttagttaggatggtgttgattttttgatttcgtgatttgtttattttggtttttaaaagtgttgggattataggcgttagttttagcgttcggcgttttttttttttttttgagatgagacggagtgtcgttttgttgtttaggttggaatgtagtggtgcgattttagtttattgtaattttcgtttttcgaatttaagtgattttttgttttagttttttgagtagttgggattttaagtatttgttattacgtttggttaatttttgtatttttagtagagacggggttttattattttggttatgttggtttcgaatttttgaattgtgatttattcgtttcggttttttaaagtgttgggattataggtgtgaattatcgtattcggttagaattttggttttttaggatagtgatagtttagagtagttagggttattaggtaggaagtttaggtagagtgttgagggttgggattgggaatttagaaagatagagagatttatttagtttttaggaaaaggagatattttggagagtttgttaggtatagtaagtagtatttatgttatattgagggagaagagtatttttaatttggtttagtttgtttagatgtttagggttaaaagagtttggcgtattttgagtattataagtagttttgaggtttgtaaattatggggaaatttttagtgagttgtgtattggtggtttatggttgtgaggtgttggattttgttttgagggtgttggggagttagattgtttttttgttttggttgtttttttggtggaatatttttttagttgtggagggtaaatgcgaatgggcgaggggaggttggagagtagagagaggtttagagtttcgtggaatgagtgaagtttgagtaagatttatggggatggagtacggagaggaaaattagaaatgttattattaggagaatttttgattaattgtttaaaaataattttgattgttgtttttgtttttatttagtttatatatttttttgttttttttttagtttggtatttattttataagtggtttttgttttagtttagtttttttttttgagatggagtttcgatttgttatttaggttggagtgtagtggcgtaatttttgtttattgtaatttttgtttttttggtttaagttatttttatgttttagtttttttagtagttgggattataagcgttttttattacgtttagttaattttttttttttttttttttttttttttttttttttttggtatttttagttaagacggggttttatcgttttggttaggttggttttgaatttttgattttacgtgatttgttttagttttttaaagtgttggaattataggtatgagttattatgtttggttagtttttatgaaggttggagtttagtggtgaggttatggtttattgtaatttttgttttttaggttagagtgatttttttattttagttttttaagtagttatgattataaggtatgtattattatgtttggttaatttttgtattttttgtagagatagggttttattttattgtttagattggttttgaatttttgagtgtaaaggatttgtttatttcggttttttagagtgttgggattataggtgtgagttattatgtttggttattttagttattttttttgtataagatattggtgttttttgtagatttgggtggtgagagggagtttatttttgttgagtttgaattttatttgttgttaagtgatgttttttgttggtgagatgtggtggtatcgggtttagatggaatacgtggattgggttttgttatacgtttttttatgttttttagattgatgttttgggttagtgaggaattttttgagaatttgtttttagtaaaattgggatagttatagttgttatttaatgggtttgttgtgaggaagtgaagttatttttataaagtatttgatgggggtgcgatgatttatgtttgtaattttagtattttggggaagttaaggtaggaggattattggagtttaggagtttaagattaatttggttaatataggagattgtgtttataaaaaataaaaaattagtcgtgcgtcgtgttgcgtgtttatggttttagttttttgggaggttgtggtgggaagattgtttgagtttgggaggttaggtttgtagtaagttattattatgttattgaattttattttgagtagtagaaggagattttgtttttaaaaaaaaaaaaaggtatttgatggtatttagttaaatgtttgtagttaggtgtggtggtatatttttgtaattttagtattttcggaggttaaggtgggttaattgttgaagtttaggagtttaagattagtttgggtaatatagtaagattttgtttttgtataaaatttagaaattagttgggtatggtggtatatatttgtggttttagttattttataggttgaagtgggaggatcgtttgagttcgggaggttgaggttacggtgagttatgattatgttattgtattttagtttgggtgataaagtgagattttgttattaaaaaaaaaaaaaaaaaattgtggtggagtttgtgttaggtttggtatattgtagtaaataaatgggataggtttatagttttttaggtaagatagataagttaacgtattatgataggaggtgggaaatagttatgaaagaaaaggaagtagagtaagaatgatatgggaagaaatttagacgtcgtggttagaggtggtaatattttttttgagattgggtgattagaaggaggttattatgtaaattttaggggagggatgttttaggtaaagagagtagttagtttaaaggttttggggtaaaattggtgtgttagatttgggggttagtgtggttgggaatttaggagggcggtggaatgtgggtagggatgaggtgggggaaatttgttagggttacgttatgtaggtttatgttagggtgttggtggtagtgaaaagaattatttatttatcgagtgtttattacgtgtcggatgttgttttgagtattttgtatgtatgtgtatatgtttattatatagtagttttttgtaagtatattttatagaagagtagaagagtgtatttggttatttgagtggtttttggttgtttttgtgattgttaggttttgagagattatggattcgaggtattttgggtattttattaattggttgatggttttttatttgggttgcgttttttttaaaaaggggagtttaaaggttttttttttttttattgtaga

SEQ ID NO: 86 - DNA, 11050 bp, Artificial Sequence
  chemically treated genomic DNA (Homo sapiens)
tttgtagtgggggaaaaaaagatttttgagtttttttttttagaagaagcgtagtttaaatagaagattattagttaattgatggggtatttagaatgtttcgggtttataattttttaagatttaataattatagaagtagttaggaattatttaagtggttaagtatatttttttatttttttgtaagatgtgtttatagagagttgttatataatgaatatgtgtatatatatgtaaagtgtttaggatagtattcggtacgtagtaaatattcgataaatgagtgattttttttattgttattagtattttgatatgggtttgtatgacgtggttttggtagattttttttattttatttttgtttatattttatcgtttttttgagtttttaattatattggtttttaggtttgatatattaattttgttttagggtttttgaattggttgttttttttatttggaatattttttttttgaggtttatatggtggtttttttttagttatttagttttagaggaaatgttgttatttttgattacgacgtttaaatttttttttatgttatttttattttattttttttttttttatgattattttttattttttgttatggtacgttaatttgtttattttgtttgaggagttataagtttgttttatttgtttattgtagtatgttaagtttagtatagattttattataattttttttttttttttttggtgataaggttttattttgttatttaggttggagtgtagtggtatgattatggtttatcgtagttttaatttttcggatttaagcggtttttttattttagtttatggagtagttgggattataggtgtatgttattatgtttagttaatttttggattttgtgtagagatagggttttgttatgttgtttaggttggttttgaatttttgagttttagtaattagtttattttggttttcgaaagtgttgggattataggagtgtgttattatatttggttgtaaatatttgattagatattattaagtgtttttttttttttttaaagatagaatttttttttattgtttagggtggagtttagtggtatgatggtagtttattataggtttgattttttaggtttaagtaatttttttattatagttttttaaggagttgggattataggtacgtagtacgacgtacggttaattttttattttttgtagatatagttttttatgttggttaggttggttttgaatttttgggttttagtgatttttttgttttggtttttttaaagtgttgggattataggtatgagttatcgtatttttattaaatgttttatggaggtaattttatttttttataataaatttattaggtggtaattatgattgttttaattttattggaaataggtttttagaggattttttattggtttagggtattaatttggagggtataaggaagcgtatggtagagtttagtttacgtattttatttgaattcggtattattatattttattagtaaagggtattatttgatagtaagtgagatttaagtttaataaggatggatttttttttattatttaggtttgtaaagggtattaatgttttatgtaaagaagatggttgagatggttaagtatggtggtttatatttgtaattttagtattttgggaggtcgaggtgggtagattttttgtatttaagagtttaagattagtttgggtaatagggtgaaattttgtttttataaaagatataaaaattagttaggtatagtggtgtatgttttgtggttatagttatttgggaggttgaagtgggaggattattttagtttgggaggtagaggttgtagtgagttatgattttattattggattttaatttttataaaaattggttaggtatggtggtttatgtttataattttagtattttgggaggttgaggtagattacgtgaggttaggagtttaagattagtttggttaagacggtgaaatttcgttttgattaaaaatgttaaaaaaaaaaaaaaaaaaaaaaaagaaaagaaaaaaaattagttaggcgtggtggagggcgtttgtaattttagttattggggaggttgaggtatgagaatagtttgaattagagaggtaaaagttatagtgagtagagattgcgttattgtattttagtttgggtgataaatcgaaattttattttaaaaaaaaaagttaagttgaagtagaagttatttgtaaaatagatattaggttaggaaagaagtaagaaaatgtgtaggttgggtgggggtagggatagtagttaaggttgtttttaagtaattagttaaaaatttttttggtggtgatatttttggttttttttttcgtattttatttttatgaattttgtttagattttatttattttacgggattttgggtttttttttattttttagttttttttcgtttattcgtatttattttttatagttgggaggatattttattagggaggtagttaggatagggaagtagtttggttttttaatatttttagggtaaagtttaatattttatagttatgagttattagtgtatagtttattggaagtttttttatgatttataagttttaaaattatttgtaatatttagaatacgttaggtttttttgattttaaatatttgaataagttggattaagttaagaatgttttttttttttagtgtaatataaatattgtttattgtatttggtaggttttttaaaatgttttttttttttggaagttgaatggatttttttgtttttttaagtttttaattttagtttttaatattttgtttaagttttttgtttgatggttttgattattttgggttgttattgttttaaagaattagggttttggtcgggtgcggtggtttatatttgtaattttagtattttgggaggtcgaggcgggtggattatagtttaggagttcgagattagtatagttaagatggtgaaatttcgtttttattaaaaatataaaaattagttaagcgtggtagtaggtgtttggaattttagttatttaggaggttgaggtagagaattatttgaattcgggaggcggaggttgtagtgagttgagatcgtattattgtattttagtttgggtaatagagcgatatttcgttttattttaaaaaaaaaaaaaaaacgtcgggcgttggggttgacgtttgtaattttagtatttttggaggttaaggtgggtagattacgaggttaggaaattaatattattttggttaatatggttaaattttttttttattaaatatataaaaaattagtcgggtgtgttggtgggcgtttgtagttttagttattcgggaggttgaggtaggagaatggcgtgaatttaggaggtaaggtagagtttgtagtgagtagagatggtgttattgtattttagtttgggcgatagaggaagatttcgttttaaaaataaataaataaataaaataagatttaaaaataaaaaattagggttttatgttattaatgtgtttttagtattgttcgataatggttgggtattatattttaaaaatatatgtaggtcgggtgtggtggtttatatttgtaattttagtattttgggaggtcgaggtgggcggattatttaaggttaggagttcgagaaaagtttggttaatatggtgaaatttcgtttttattaaaaatataaaaattagttaggcgtggtggcgggtgtttgtaattttagttattcgggaggttgaggtaggagaatcgtttgaatttgggaggtagaggttgtagtgagttaagatcgtgttattgtattttagtttgggtgatagagtgaaattttgttttaaaaaaaaaaaaaaaaaaaaaaaaaaaaaatatatgtaaaatttatatttttgattttttttttttgagatagtttttattatttaggttggagtatagtggtgcggttttagtttattgcgatttttgttttttagggtttaagtgatttttttgtttagtttttcgagtagttgggattgtaggtgcgtatcgttatatttagttgatttttgtatttttagtagagacggggttttattattttggttagattggttttgaatttttgattttaaatgatttgtttattttagttttttaaagtgttgagattataggcgtgagttagtgttcggttgttggttttgttttttttaatagtaattttattggtaattttaaattgaattttaataagttttttcggttttttcgataatttttttgaagtgataagagttaatatttatttagttttttattagttgttagttattataaaaaagaaatattgtaaggtttagttaatttaattttttttaatatttatgtaaaaaaggtattatgattttgtttagtttttagatttggaaaatgaggtttaataaaggtgataatttatttgagaatgtgagagagttttttcgattttaataattgagtttttttttttttttttttttttagataggtttttgtttagtttaggtagtagtgtagtggtgtaattatagtttattgtagttttaatttttttagtttaagcgatttttttattttagttttttaagtagttgggattatagacgtattttatttacgtttagttttttttttttttttttttttttttgtagagaaaaggtttggttttgtcgtttaggttgattttgaatttttgtgttttagtgatttttttgttttagttttttaaagtgttgggtttataggtttgaattattacgttcggttaaaaattgggtttttaagtagaattttatacgggtggttttaattattttatttgttatgtgattttgggtaagttatattatttttgttttagtttttttttttttttttttttttttttttgagacggagtttcgtttttgttgtttaggttgtagtttaatggcgtaatttcggtttattgtaattttcgttttttgggtttaagtaatttttttgttttagtttttcgagtagttgggattataggtatgcgttattatgttcggttaattttgtatttttagtagagaaagggtttttttatgtcggttaggttggtttcgaattttcgattttaggtgattcgttcgtttcggttttttaaagtgttgggattgattataggggtgagttatcgcgttcggttttagttttttagttgacgaatgggaataataatagttttttttttataagattgttgtgagaattaaatgttattaagatttatatgaaagtatatagattagtttatgatatagagcgttagttattattatggtatatgtttattgtgggttgattattgaaaaagtcggtgattaagaaagttttagtttttgtttttacggagtttaaaggttattgggaggagagagagttttacgatagtttagaggaattagggtttgatgggagatggttttagcgtacggtaagttagcggtagttacgtgaagggataaggtaaggttttttggaggaagggttttgtgattttaaattttgtaagatgagtagtagtgattacgttaaagggtagagtgtaagatgaattaatggagtgttgaagataggaagtagtttgtgtaaaggttaaggagttaattcgaagtttggttggataaatatttagaaagagaggcgggtgtaggggacggaagaggggttagttcgtgcgggatagtttggatttcggattatttcgagaatttattattttttttgatttttttattgaggttgttgatataaatagtgtggttagggcgggtttcgggaattgttatggagtgaagtgttgaggtaagttttaaaggaggaaaaacgtgattttagttttgggtttttttaaattttttgttttaacgtcggttgtttaaggattttttttcgaaaaggaagttaggtaaggcgggagtaggggtaaggacggaggtaaagcgcgataataaagcgtgcgtaggattcgtttttttagttcgcgtgcggagagaattttcgagagatttattacgatttttaggatgttttacgcgattcggtgggcggagtattttaaatggcgatttttattggtttaagtattcgaagggtcgtttcggagaaaaaattcggatgtgggagttagtatagaaaaaagggataggttttaggtagtttggtttcgagtagtaagtttttttagacgggtttaggaaggttcggacgttaagcgtatcgttcgtttgtcgtcgatggtcgtttgtatcggaggttatttttcgatagggtcgtagtttttttaatcggcgtttgttatttttttgagattaaattataaagtttttttttttggtttcgtttttgtttttttgttagttaatcgtcgcgcggaaacgtagtagtttgattaattagagtaagtttcgtttttgggtttagttgttgttaattaaaacgatatttgggttttcgtttaggtagaaaaatttcgttttattttttgaaagtttattttttttcgtggcgttcgggtttacggattaattagtgaaggttacgagtttgtacgcgtttcgcgttgcggtgtttttcggaggtaattttttttggagtttcgttttttattttcgttagagttgcgttttttgttacgtgatcgtaaaatgggcgggaattgttgcgtgtaatattacgtgatatgggaaaggtagtgtgcgggggtcgttatttttcgggagtgggaggtgtattttattttttgattttttttttttttttagtggttatcgcggcgtttatcggtttttgatttttgagttttttttaatttatagacgttttttgttgttttggttttaggattttttttataattaggttattttttttgttaggtgttttttttgattttttgatttttgatttaaaggttagtttaaaggtttcgaattcgggtttgggatgtgagggggtattgaatttaagtttttcgaatttttagttttgggtttttaagtcgtatttttaaggtattttattttagatttgagtttttatattttaaatttatttatgagtttttatatttagttttaaagaatgagttaatttttattaattttttatttaagattttcgaggtaatttaatcggtattatagattcggtttcggatttaaggattttattttgttaatcgttaggtgttttatgatttgagttagtttcgtaatttttgttttcgtggttttaaatattagttttggtttttttatatttattgtttagtttttagattttggaatttagtttttaaatttttaaaatttttatttttgagatcgtttttcgttggaggattttttttttttcgttttttgaattttttaatattttttgtagattttaaaatgatttttttatgttttttttttttaaaattattaattttttttttaaaaatttttgtattttaagttagtagtattttatttttttttttatttttaagttttttggattttttagttttattattttttttttggagttagtagatttttgtttttttatcgtttttattgttttttttattcgttgttatagggtttgtttttcgttatgttttcggtttggagaagagttagtttttgaaggaggtttttgataaggtcggttcggtttttaagggtagagaagatgtgaagaggtttttgaaattatataaggatcggtagggtttttatgttttatttattatttaggttttgttttagatattttatagattttttggggtggggggggggttttcgtgtttttaagattaaataggttgattatttaggttttttatttagattttttttatggtggtgtgtttttagtaatgaagaaagttgtttttataagtgtttagtttagttcgggtgttttggtttatgtatgtaattttagtattttgggaggtcgaggcgggtggattatttgaggttaggagttggagatttgtttgattaatatggtgaaatcgtatttttattaaaaatataaaaattagttaggtgtggtggtatgtaattgtagttttagttattcgggaggttgaggcgggagaatcgtttgaattttggaggtagaggttgtagtgagttaaaattgcgttattgtattttagtttggaagatagagtaagattttgttttaaaaaaaaaaaaaaaaaaaaaaaagagtaaatgtttagtttagtgagagagatagatttttttatttttttagatagtgataatttagagtggttagggttgttatgataaagtttagaggggtgtttgatttaggttggggagttagggggagttttttggagaaggggaattttgagtgttgttgagtaagtcgtgtaaatgttgtgtgatgagagtatatagtttgcgtaggggtttggagtgaaatgaggatatgttttatttaaggaattgtaaatatgtttttaatttgtcgggggaagtggtaaatatggggttgtgaaagcggtagagttagtttacgtaggatagagcgggtcgtgtaaagggattgagatttttttgagggtacgggggagttttggagaggttttgtgtagaaaaggaggttgtttgtggaagtggtatttaggagttttgaggaaattgggatatttagggatttaggtgggaggggaaaggagagtgttagatttaggttggggttttgaggttgaggtttagtgattgtttggttgaagaaaagagggagaagcgatttgttaggatttatattgaaattttaagttttttagatattttttttttttaatggagttttttttttttatttaggttggagtgaattggcgtttattattacgtttagttaatttttgtaattttagtagagatagggtttgttatgttggttaggttggtttcgaatttttaattttaggtgatttatttgttttagttttttaaagtggtgggattataggcgtgagttattgggtttggttttcggatatatttataattttttttaaatgtttttattgagatgaggtaaatttaatgtaaattatagttattttttattgaatgttttattttatgttaggcgttgttgtgtttaaatattaatttattgaatttttttaataattttatgaggtagaaatttttattgttttatttttttggtgagaaaattgaggtttatagaagtgaagttttttagttataatgttttttagttatagtgtagaaagaggaagagtttaatttgaattttggcggtagggttttaagttgtttgtttgtttgtttgtttttgggatagggttttgttttgttgtttaggatggaatgtagtagttggattatagtttattgtagttttaattttttaggtttaagtgatttttttattttagtttttaaaatagttgggattatagatgtgcgttattatgttcggttagttttttgtatatatatatttttttgtagatatagagttttgttgtgttgtttaggttgggttttgaatttttgggtttaagcgatttttttgtttcgattatttaaagtgttggaattataggcgttagttatcgtatttagtttggttttatgtttatttatttatttatttatttagagatggagtttcgtttttattgtttagattggagtgtagtggtatgattttagtttattgtaatttttgtttttcgggtttaagcgatttttttgtttcggttttttgagtagttgggattataggtgtttattattacgtttggttaattttttgtatttttagtagagacgggttgtcgttttgttggttaggttggtttcgaatttttgattttaggtgatttatttgttttagttttttaaagtgttgggattataggcgtgagttgttgtattcggtttttatgtttttaattatatttatgtggtattattttttattaggagggtattttaaattaggaattaggagttttgagttcgtatttttttaatatttaaatcgaattttgtttttttattagttttggaataggaataataagtatgggtcgggtacggtggtttatgtttataattttagtattttgggaggttaaggtaggtagattatttgaggttaggagtttgagattagtttggttaatatggtaaaattttgtttttattaaaaatataaaaattagtcggaaatggtggtatatatttgtaattttagttattcgggaggttgaagtaggagaattgtttgaatttaggaggtggaggtggtagtgagttaagatcgtattattgtattttagttcgggcgatagagtaagattgtattttaataaaaaaaaggaggtcgggtatggtggtttacgtttgtaattttagtattttttagaggttgaggcgggtggattatttgaggttagtagttcgagattagtttgattaatatggagaaatttcgtatttattaaaaatataaaaaagggtcgggtgtagtggtttacgtttgtgattttagtattttggtaggttgaggcgggtaaattacgaagttaggagatcgagattattttggttaatagggtgaaattttgttgttattaaaaatataaaaaattagttaggtgtggtggcgggagtttgtagttttagttattcgggaggttgaggtaggagaatggcgtgaattcgggaggtagagtttgtagtgagttaagatcgggttattgtattttagttgttttaaaaaaaaataaaaataaaaataaaaatttagttaggtatggtggcgtatgtttataattttagttatttaggaggttgaggtaggagaatcgtttgaatttaggaggcggaggttgtggtgagttaagatt

SEQ ID NO: 87 - DNA, 6182 bp, Artificial Sequence
  chemically treated genomic DNA (Homo sapiens)
ttagattttatagttaaaaaaagggggtggggataggtggttaatagtaattacgtgaggtttaaaagtttattttataattatgtaattgtataaatgatataaatagaagttagataaaattattagtatatatatagtattaaagtataaattattatagaaaatttgatataaagttgtatataagtatttgtaaaggtaattaagtttttttagtttatgggaatataaaagttgttagtaattaatttatattataaaaaaggaaaattattatttatgttattataaaagtaatatttttaaaagtaaaaataatttttatttgatattagtaatttgaaaaatttagtatatttataattattgtttaattaatattttttattgatttaatattattatttaaatgtagatgtaaaataattttgtatggtaaatatgtttattttgtgttaatgaaattatgaaatagtttttttaagtttatagataagttaattaatgattgattatagaatagattggtgagtgttataaaaaaaaaaagatttgtttaggggattattaggggtggaggaagaatatttgggttttatttattgggtatttgatgtttttatttttatttgtaagttaggggataattatattaatattgtatgaatatattgttattgggaaaagtatttatttaatagatgtttattatatattttgtattaggtagtgtgttaagtgttgaaatagggaaggataaggtatattttacgggggttcgtagtgtgggtaggtgttgagttaacgtatatatataagggttgggtattgttagatttgtattatttcggagtaacgatttgtttttttgaatgatttttggtatggtaaaagagttaattgtattttaaaaggtgaaataaaattttttttgttttgttatgtatgttttaaattgattagtggtttaggtttggagtatgtattagaattatttgtgaagtttagtgaaagtgttgatgttagagtttatttaaagtttattgttttagaattattggggatttggtagttttgatgtgtacgattagttaagaattttttaaaggttgataaagtaattttgaaattattgttaatgtaaaagtggatgttttttattaataagaatttaaaaaataaagtatagttagtataagatttgttttttgtgtttataaaatttaagtgttagttattttttaattataaaattttatttaaaaagatttgtagttaaaatatcgagttaaaaaataaaaaaggtattaaagtagtgtcgattttaatgtgtaaaggttttttacgtgttgatattgtaagtaatttgtgtgtatgtgtatatatgtatttgtttttagggaaagaaaagttgttaaagttaattaaggttatgaatttttgttattattttaatattaaatttttaagtgaaaatttattgaatattattataaatgtggtaaattgatatagttggtttattgtataaattttaatgttaaagggattagattagagttttagttttatttattgggtttataatattgtgtagggtatttattttattttaggaaaatggaagtaattgttttattttatagaggtattaaatgaaagaaatgagaaaattataaattaatattgaagtttgaattattgtttagtatttaaagtttagtataattgtaatgtttttaataaaaaaatttattgataggtgtatttttatagtgtatttaaaagtagtatttaatattaaaaatttagtatttaaaagagtatataattaggtagggtgtggtggtttacgtttgtaattttaatattttgggaggttaagatgggaggattatttgaggttaggagttcgagattagtttggttaatatagcgagattttaattttttttttttttgagatagtttcgtttatcgtttaggttggagtgtaatggtgtgatttcggtttattgtaatttttgtttttcgagtttaaatgatttttttgtcgtagttttatgaagtagttggaattagatgttcgttatttcgtttagttaatttttttgtatttttagtagagatggggttttattatgttagttaggttggttttgaatttttgattttaggtgatttatttattttatttttttaaaatgttgggattataggtatgagttattatgttcggttaatgttatttattaaaaaaataaagaaaaagagtatataattataaagtattgggttaaatgtattgtttttatgtttgtaaggatttattatagaaatattaggttgatgtaaaaattaaatttttagattgcgaattttaaattattgtaattacgttaaaatatattttattaattaaaataggaattattataattaatatatttttgttaatgagaaatgtttgtttatttttgtagtataaaaattcgtgttttaggatttgacgaatttttggaaagtattttttgtattatgttgaagtgttttttttgtaaaaagttgttaagatgttagtagaagtggtagttagttggcgaaaggttaggtgaatatggtggatgaggtaaaattttgtagtttaatttttttaatttttgaagtattggttgtgcgatacgtagttaggtgttgtcgtggagaagaattgggttttttttgttgattaatgtaggtagtaggtattgtagttttcggtgtattttattaatttgttgagtatattttttagatgtaatggttttattaggatttagaaaattgtagtggattagatgggtagtagattatcgaatagtgattatgattttttttttggtgtaagtttggttttgggaattgttttggagttgttttttggtttaattattgagttggttgttgtataaaatttattttttattatatgttataattcgattgagaaatggtttgttgttgcgtagtataaaagaagattatattttaaaacgatagttttgattttcgtttagtttatgaggtatttatttattaagtttttttatttttttaatttgtttcgaatgttgaacgattttaatgatcgtagaatagttaacgttgagtttttttgtaattttttatgtagtttaatgattgtttttaattggtcgttgttaattttttatggtttatattacgttttttatttttaaggtttttttttttgtaaaattttttaagttattattgtattgtatgtttgttagtagtttttgggttaaatgtgttattgatgttttgagttgttttcgttgttttatgaattattttgaattcgaataagaaaattgttttaaatttgttttttatttaatattattagataaaaagtatattttaaaataaatagtaataagttattagtaaaaaaataaagtgagaaatgtgtattaaaatgatttatatttatttaagaatgtattttaatattaaatagtaaattttaaaaatgtaaaaacgtaattgtttttgttttttaggtatattatttgatttttttagtttttatttattttatttttaaaatcggaaaatttttttgtaagaaaaaaatttgattatatttttttaaggttttttttaattttaagagttgtgttttattatgataaaacgaatttagttttttttttaattttgtaacgttagaaaaaggaggaaggggaaatagttgtgtttaaaatattttttattaaatagaaatattataagattatggaaaaaaaaatattaaatgttggagttattttgataaaaatttaaatggatattgtgtgggaaaaaaagttaatttatttattttggagttaatatttatttttaataagtaagaaaattgaagaaaaaaaattagtataagatttatagtttgtagtttaaatattttagggtatttaggataaataagcgtttgtatttttttaggtaagttaaaattacgatataaaatagagaaatatgtaaggaaaatttatagtttaagagtttaagagtaagataggttaatttttttaaataaatttaagtaatgttgttaaaagttgttttatatatttttattattatgtattatttttaaatttcgaggaggaggggtatggaattatataagatttggatcgtatgtttattaagaaattaaaaattataggttttggggcgttttaatattttatttgagatggttagaacgggcgtatttttagatttttaaaatttaaattaaaaattattagtatcgaggaagggtcgaagagtttaatatttatttaatataatttttattttcgatttatagacgttttgttgagcggttgggagaattcgtcgcgttagttagggttcggttttttttaataatagatattttgcgagttttttagaagttttggttaagcgagaaggtagggtggaggtcgttattgcgaggacggtttttatttagttgcgaggagttcgcggttttttagaggggcgggtttgcgttcgggtaatcgtgcgcgacgtttacgagtttttaggacgattagttttttagtttttaggtttcgacgtttgcgttatttaagttatatattcgttcgttcggtcgcggttaaggtcggcggtagttacgtagtcgtcgtcgttcggggttttatagtttacgggtcggatggatcgagcgtcggttgcggcgtttcggtgcgcgcgcgcgttttagttaatcgcgttttcgttcgtttttcgtcgcggcggcgaggttggcgttgggaagaggaagaagaatattcgttttttttttattagcgcgcgggcggcggcggcggcggtatcggggttacgaattttgattttttattgataaaaataataataaattttttttttttcgcgatttcggcggcgttttcgggttcgttttcgttatttcgtttttatttcggcgtttcgtttttcgttcgttgtttcgcgagttcgcggttttcgggttttcgttattcgtcgatatcgggagttcgggtttttcgcgttttgtttttcgcgtcgggggtcgttcgtcgtagatacgggattcgtttcgaggtcgttttggcgttaaattttgaggtaaaattgaaagagggtcgggcgggttcgggtcggcggcggagggggcgggtttggcgcgcggatatggaggcgtcgcggcggcggttgaattcgatttttttatttttgttacggggtggcggcggcggcgttcggcgttttgtatagtgggtcgggtcgtttttttttttttttcgttcgcggtcgggcgaagcgagcgggttttttttgatcggttcggtcggcgtaagggtgggggtggagggggaatggtcgcggtttcgttttatagttggtttttcgttagcgtcgttattttgttttcgacggagatggtttcggttgggcgggttttttttttttttatttttttttttttttcgtttgtagtttttttttttttttttgtcgggatttttattttttcgtttttagttcgtttttggcggtcgtcgtagtttaatcgtcgttttttttgaaggggagggtaaaagaaaaggaggaaggcgggtgcgaggcgcgatttcgtgagcgacggatgggttggttaattggcgtttagataggagggtcggggtttgtggtatcgtttttttaagttttgttgattggttgaggcggaagagggtggtttttatggggcgcgggagttttggcggggcgggagtagaggtcggggcgaagagtggggtcgggtcggcgggggcggggtcgggggcggggcgcgaggggcgcggtcgggtggagaggtcggcgtttggttttgggttagtaggtgggttgttttttttcgtttggaacgcgtttcgaatgagtattgaggaataatagtaataaaggtgatgaagtatttcgagtttacgatgcgttttcgtgggaagaggttttcggaattaggatattttttagggtttttgttcgttatttcgtagcggttttggcgaattttttaatgaggtttaattttatcgattgtaaatggggggtatgcgtatttttgttaggtcggattttttttttga

SEQ ID NO: 88 - DNA, 6182 bp, Artificial Sequence
  chemically treated genomic DNA (Homo sapiens)
ttagaagggaggttcggtttggtaagaatgcgtatgttttttatttatagtcgataaaattgagttttattaggggattcgttaaggtcgttgcgaaataacgagtaggagttttgaaaagtgttttggtttcgaaaatttttttttacgagagcgtatcgtggattcgaaatgttttattatttttattattattgttttttagtatttattcgagacgcgttttaggcggagggaagtagtttatttgttgatttaagattaggcgtcggtttttttattcggtcgcgtttttcgcgtttcgttttcggtttcgttttcgtcgattcggttttatttttcgtttcggtttttattttcgtttcgttagggttttcgcgttttataaggattattttttttcgttttagttaattagtaaagtttaggggggcggtgttataggtttcggtttttttatttgggcgttaattagttagtttattcgtcgtttacgaggtcgcgtttcgtattcgttttttttttttttttttatttttttttttagaaaaaacggcggttgggttgcgacggtcgttaaaggcggattagaagcggaggggtgaaaatttcggtagagaaggaagaagggattgtaggcgggaggaggaggaggataaggaggaagggagttcgtttagtcggagttattttcgtcgagaataaaatggcggcgttggcggagggttaattataaggcggggtcgcggttattttttttttatttttatttttgcgtcggtcgggtcggttagggggaattcgttcgtttcgttcggtcgcgggcggggaggggaggggagcggttcggtttattatgtaaagcgtcgggcgtcgtcgtcgttatttcgtggtaaaggtaaaagggtcgggtttagtcgtcgtcgcggcgtttttatgttcgcgcgttaggttcgtttttttcgtcgtcggttcgagttcgttcgatttttttttaattttattttaggatttggcgttaaagcggtttcgaagcgggtttcgtgtttgcggcgggcggttttcggcgcggagggtagggcgcggggagttcgggttttcggtgtcggcggatggcgggagttcgggggtcgcgggttcgcggggtagcgggcgagagacgagacgtcgaggtgggagcggggtggcggggacgggttcgggggcgtcgtcggggtcgcggagaagggggggtttgttattgtttttgttagtgaaaggttagagttcgtgatttcggtgtcgtcgtcgtcgtcgttcgcgcgttggtaggaggagggcgaatgtttttttttttttttttagcgttagtttcgtcgtcgcggcggggggcgggcgagaacgcgattggttgaggcgcgcgcgcgtatcggaacgtcgtagtcggcgttcggtttattcggttcgtgggttgtggggtttcgggcggcggcggttacgtagttgtcgtcggttttggtcgcggtcgggcgggcggatatgtggtttaaatggcgtaggcgtcggggtttagaggttgaagggttggtcgttttaaaaattcgtggacgtcgcgtacggttattcggacgtaggttcgtttttttggggaatcgcgagtttttcgtagttgggtggggatcgttttcgtagtggcggtttttattttgttttttcgtttagttaaggtttttggaaggttcgtaaagtgtttgttgttggaagaagtcgggttttgattggcgcgacggatttttttagtcgtttagtagagcgtttgtaggtcggaagtgggggttgtattgggtgggtattgagtttttcggttttttttcggtattgatagtttttaatttaggttttaaaggtttaaagatgcgttcgttttggttattttaggtgaaatgttgaaacgttttagaatttataatttttggttttttagtaaatatacgatttagattttgtgtaattttatgtttttttttttcgaaatttggaagtagtatatggtaatagggatgtgtaaagtagtttttagtagtattgtttaaatttatttgaagaaattggtttgttttgtttttaaatttttgggttgtaggttttttttatatatttttttgttttatgtcgtggttttgatttgtttgggaaggtgtaggcgtttatttattttaaatgttttgaagtgtttaggttataggttgtagattttatattgattttttttttttagtttttttgtttattaagaataaatattgattttagaatggatgggttaatttttttttttatatagtatttatttgggtttttattaggatgattttaatatttagtatttttttttttataattttataatatttttatttggtaaaaaatgttttaaatatagttatttttttttttttttttttttgacgttgtaaaattgggaaaagagttaggttcgttttgttatggtaaagtatagtttttgaaattggaagaggttttaagggaatgtggttaaattttttttttgtagaaagatttttcgattttaggggtgaagtgggtgagaattagaaaggttaagtgatgtatttgagaggtaaaagtaattgcgtttttgtatttttgaaatttgttgtttgatattggaatatatttttaaataaatgtggattattttaatgtatattttttattttatttttttgttaatgatttattgttgtttattttagaatatgttttttgtttaatgatgttagataaaaagtaaatttggagtagtttttttattcgagtttaaaatggtttataaagtagcgaagataatttaaaatattagtaatatatttggtttaggaattgttaataaatatatagtgtagtggtggtttaagaagttttgtaaggaagagagttttgaagatgaggaacgtgatatgggttatgggaagttgataacgattaattgagagtaattattgaattatatgaaaaattatagaagaatttagcgttgattattttacggttattagggtcgtttagtattcgaagtaaattggaaaggtgaaaaagtttgataagtgggtgttttatgagttgagcggaaattaaaattatcgttttgaagtgtagtttttttttatgttacgtaataataaattattttttaatcggattgtgatatgtaatgaaaagtgaattttatataataattagtttagtggttggattaagaggtagttttaaagtagtttttaaagttaaatttgtattaaaaaaaaggttatggttattgttcggtggtttgttgtttatttgatttattatagttttttgaattttggtgaaattattatatttgagaagtatgtttagtaaattggtaagatgtatcgaaaattgtaatatttgttgtttgtattggttaatagaaagggtttaatttttttttacgataatatttgattgcgtgtcgtataattagtgttttaaaagttgaaggaattgggttataaagttttgttttatttattatatttatttgatttttcgttaattgattattatttttgttagtattttgataattttttgtagggaaaatattttagtatggtgtagaaaatgttttttaagagttcgttaaattttgaagtacggatttttatgttataggaataaataaatattttttattggtaaaaatgtgttgattgtaatggtttttgttttgattaatagaatatgttttagcgtagttataatgatttaaaattcgtagtttggaaatttaatttttgtattaatttaatatttttatggtaaatttttgtaaatatggaaataatgtatttggtttagtgttttgtggttgtgtattttttttttttgtttttttaatagatggtattggtcgggtatggtggtttatgtttgtaattttagtattttgggaaggtgaggtgggtggattatttgaggttaggagtttaagattagtttgattaatatggtaaaattttatttttattaaaaatataaaaaaattagttaggcggggtggcgggtatttaattttagttattttatgaggttgcgataggagaattatttgaattcgggaggtagaggttgtagtgagtcgagattatattattgtattttagtttgggcgatgagcgaaattgttttaaaaaaaaaaaaagttggggtttcgttgtgttgattaggttggtttcgaatttttggttttaagtgatttttttattttggttttttaaagtgttaggattataggcgtgagttattatattttgtttggttgtgtatttttttaaatattaagtttttaatgttaaatgttgtttttagatatattgtaaaaatatatttattaatgagtttttttattaaaaatattgtaattgtattagattttaaatattaagtaataatttaggttttaatgttggtttatagtttttttattttttttatttaatatttttgtaaaatgaagtagttatttttatttttttgaggtgagataagtgttttgtataatgttataggtttagtaagtgagattggagttttgatttaatttttttgatattaaagtttgtgtagtaaattagttatgttagtttgttatatttgtaatagtgtttaataaatttttatttaaaggtttaatattaaagtagtagtaagaatttataattttaattggttttaatagtttttttttttttgaaaatagatgtatatgtatatatgtatatagattgtttataatattagtacgtaaaaggtttttgtatattgaagtcggtattgttttggtgttttttttgttttttggttcggtgttttgattgtaagtttttttggatagaattttatagttagaaagtagttaatatttgggttttataggtataaaaaataagttttatattagttgtattttattttttgagtttttattaatgaggaatatttatttttgtattgatagtgattttaagattgttttattagtttttaaaggatttttgattagtcgtgtatattagaattgttaggtttttagtggttttgaagtagtaagttttgggtgggttttggtattagtatttttattaagttttatagataattttgatgtatattttaggtttgaattattgattaatttgaaatatgtataataaagtaaaaaaagttttgttttattttttgaaatatagttaatttttttattatgttagagattatttagagagataggtcgttgtttcggagtgatatagatttggtagtatttagtttttgtgtgtgtgcgttagtttagtatttgtttatattgcgagttttcgtaggatgtgttttgtttttttttgttttagtatttaatatattatttggtatagagtatgtagtgggtatttgttgaatgaatgttttttttagtagtagtgtatttatataatattaatataattgttttttggtttatagataaaaatgaaagtattaagtgtttagtgagtgagatttaggtgttttttttttatttttagtggttttttgggtaggtttttttttttttgtaatatttattagtttgttttgtagttaattattgattgatttgtttgtgaatttggaggaattgttttatagttttattagtatagagtaaatatgtttgttatgtaaggttattttgtatttgtatttaagtgataatgttgaattaatgaaaagtgttgattaagtagtagttgtagatatgttaagttttttaaattattaatattaagtggagattgtttttatttttaagggtattgtttttgtgatagtataaataatggttttttttttttgtaatgtaaattaattgttggtaatttttgtatttttatagattggggaagtttaattgtttttataagtatttatgtataattttgtattaaattttttgtaatagtttatgttttagtattatatatgtattaataattttatttgatttttgtttatattatttgtataattatatggttgtaaaataaatttttaaattttacgtaattgttgttagttatttatttttattttttttttttaattgtggaatttga

SEQ ID NO: 89 - DNA, 5844 bp, Artificial Sequence
  chemically treated genomic DNA (Homo sapiens)
atgtattaatgtagttagttaatttaaaattttttttttttttttttttttttagacggagtttcgtttttattgtttaggttggagtgtaatggtaggattttagtttattataatttttatttttcgggtttaagtaatgttttcgttttagttttttaagtagttgagattataggtatatattattacgttcggttaatttttgtatttttagtagagacggggttttattatgttggttaggttggtttcgaatttttgatttcgtgattcgttcgtttcggttttttagagtgttgggattataggtatgagttatcgtggtcggtattttttttttttttttttgagacggagttttattttgttatttaggttggagtgtagtggcgtgattttggtttattgtaagttttatttttcgggtttacgttatttttttgttttagtttttcgagtagttgggattataggcgtttattattatgtttagttaattttttgtatttttagtagagacggggttttatcgtgttagttaggatggtttcgattttttgatttcgtgattcgttggttttagttttttaaagtgttgggattataggcgtgagtatcgcgtttagttagaatttaaaatttttaataggattattttagaatttttatattttatatataatttatattttttattttttttttgtttaaaatatttttatttttaaagagatagggttttattatgttgtttaggttggttttaaatttttgggtttgagtgatttttttatttcgattttataaagtgttgggatgataagtgtgaatcgttatgtttggtttattttttttttttttttttttagtatttggtatgtgtttgtttgtgtttagaatatttttttttttattttttgtttggaaaaattttgtttttgtagaggaaggagtaatttggatttaaattttggttttgtattttttattttatgattttgggttagtagtttaatttttgtgattttttttgtttggagaatagggattaaaatggtttttattttttggggtttttattttataagtttgtttgtttttttagaagtaaaattttttggtttgtaggtatatgttattgttattatggattaatgataacgtattgtttttaatgagttttttagtgatatttttgagagaaggggttatggataatgtttttttgaattttaatgttaaggttttaggtttataggatttttgggtagttgtagagagttgaggattttttaaggatttatttttttttttatagtttttgttttttttggtggtatgtgatggagttgggttttatgttggttttcgggatgtttatttttataggtttttttaaaatagagatattggttattagtttttttgttttagaagtgtttttttgtattcgttggaggagtagtttatttcggtatataggtatatatttgtttaagttgaagaagtgggagtgtagttttttggtgaagtagatgttttgtagttgtaggggttttaagtagggatagatgtaattagttttgttttttgtatttcgttttattattttgtttttagtattagtatgtagaagggaggtataggggagggtttgcggtgttttattttatgttttgtttggattgttggacgttattttttgggtagagtaggaggagggtaaatttgggtagaggtaggtggggtcggttcggtttatttcgaggggtttatttttttttattaacgtattaattttaggttttagatgtggcggagttttaggatttttagaggataggaaaggttttatgttttaattttttatatttttagggagtgttttttttttattttattttagggaatgagggatagtagtattattatttttttatagtttaaagtggtattttttagatttttaggttagattatttagttttttttggttttttttttttttttattttttatattttattaattattgtatttggattgtttatttttttaatatatttggataatgtttatttttttatatttttttttgtattgttattgtaattagtttagtttaggttagtggatggttttaagtttttttttttggttttttaggatttatttgtgatatttataggtttttttttatttagtagttagggtgagttttgaagggttttagtgtggttaggtggttttttatgaattttaggatagttaagttttttgtttaggagtggaagttttaggtatttttttattcggttatttggttattagagttaagtaattttttgtgaagttagtagagtaggaatttttaggtgtggtaattaggtttttaaatagggttgaacggtatacgtttagttaggggtaaatttgaagttaggatattgggtttttagtttttggtttagaatttttttataggatattttatgtttaatttttaaattttttttaagattgtggggttttggatggtttagagaatagagggttttggaggtttgacgttaaaggagttgtaagatatgttttgtggtcgttttttggttttgttttatgtttaaggttttttttaaattatgtttttttagggatgttgtaggagttataaatttaagttttagttttggggtagaacgttcggaaatcggagtgttagggttttatgaaaaggtagcgagaaggggtttgttttgacgaggttgggttcgtttcgaattttcgttttttttttttttgtttagtatattggttcgggtattttagagatgagggtcgtttatgtaggattggtgattggatacggtgatgaggggcgtggtcgggtttcgtttttcgatgagttcgtatagtatttttttgttgtgtacggttaggtggtttatgtattttggcggggaaggagaggttaggcgtttcgggttcgttcgttaggtcggggtcgcggcgttttttattttaagttttattttcggtcgggtatgggtattcgggcgggtttgtttcggtttgggtttatttattggtttagaagtagttgtaggtgtttattaagtttatgacgacgttgttggttagggtttaggtgagcggcggtatcgcggggaacggttatttttacgtgtagaggttattttattcgatcgtcggtcgggtttttagcgtttcgggtcgatttgtggaacgtttttaggttgcgatttttatcgtttcgatatattggtttttgattggttcgcgtacggacggacgggggcgcggcgtaatagggtattggatcgaggttttttcgtaggttaggtcggagtagcgttcggtttcgttttttcgttattggggagcggttttcgaagttataggtcgtgggcgcgttgcggaacgggaggaaacgggaaagcgggcgttggtatttcggttcggtgtaatcgtcggaaagcgaatttgcgtcggtgtttagttcgatcgattgtcgaaagcgcgtacgggtcgtttgacggtagcgaggttagtttcggggcggcgggaagtggtcgttatttcgtggggttttcgttttttggtagttttttgcgttcgttttttgtttttttagtgtttttgttttttgtttgatatagggtttagttagatttaggttggagtgtagtgatgggattatggtttattgtagtttcgattttttagatttaagcgatttttttgttttagtttttcgagtagttgggattataggcgttcgttattatattttgatttattcgtttcggttttttaaagtgttgggatgatagtcgtgagttatttcgtttagttatatatataatttgatatagttatagtattatatgatattatgtgtatgtagtaatgtataatttattgtatggtaaaatatataatatatatagtaatatatataaatatattgtgtattatatgtaatataagaaatagtattttatattatttgatatagttataatgttagttattatttttagttttgaaatatatttatgattcggaaagaaagttttttatgtattaagtagttagttttttatttttattttatatttatttatttattattatttttttaggagtttcgttttgtcgttagttggagtgtagtggtataatttcggtttattgtaattttcgtttttcgggtttaagttatttttttgttttagttttttgagtagttgggattataggcgtaggtcgttacgttcggttaatttttttttttttttgtattttagtagagatggggttttattatgttgtttaggttggtttcgaatttttgagtttaggtagtttatttattttagttttttaaagtgttaggattataggtatgggttatcgtattcggtagttttttatttttatttttatttatttttatttttgagatagagttttgttttgttgtttaggttggagtgtagtgacgagattttagtttattgtaatttttgttttttaggtttaagcgatttttttgttttagttttttgagtagttgggattataggcgtaagttattatatttggttaatttttgtatttttagtagaggttgggtttttttatgttggttaagttggtttcgaattttcggttttaggtgatttgtttgtttttttttttaaagtgtgagttattttatttggtttgttttttatttttaaattataatttattgatttttttttttgagatggagtttcgtattgtcgttcgggttggagtgcgagtgtagtggtgtgatttcggtttattgtaagtttcgttttttaggtttaagtaatttttttgttttagttttttgagtagttgggattataggcgtttattattacgtcgggttaattttttgtatttttagtagaaacgggttttattatgttggttaggttggttttgaacgtttgatttcgtatttattcgttttagttttttaaagtgttgggattataggtatgagttattacgtttagtttataatttattgattttttaaaatttgtttagttttttattattacgtcgaatttattagttatagttattttatgagaagttgagtggatttagttttattttttgtttatagattttgttcgagtattttatttgttttaatagtattattgtaggatttttaggacgttggattgttagttttttgggtttttttttttttggggtagatttttagtttttttttgattttacgattgtggttagattatgtgtggattgtttttttttttgggtttttagagcgtttgtattaaatatttttaatttagaagtgtgtagttatattgggatttagaatttaataatagggatagaagatttacgtttttggggtgttcggtttcgtggtattaggtatgatttttagtttttgcgttttttttagtaattgttgattggggatttagatcgggagttgagcgacgggtttggcgagcgaagttcggggttttatttaggtattagtttttttttgttttaggtttgagtgatttataggtttgttatgtttcgttggttcgggaaggcggggtttgggtgggaaggtgggcgggtaggttagtagtttttaggtttggtgttggttttttttgttggcggcgaggcggagacgtggcgggtttgtttgttggtaagggtggggcgttcggtttagttaggttttttttggtcgtgtggtttaggaatatagttttttttttttttttttttttttttagt

SEQ ID NO: 90 - DNA, 5844 bp, Artificial Sequence
  chemically treated genomic DNA (Homo sapiens)
gttaggaggggaaaaaaaagaggaagaggttgtgtttttgagttatacggttagaaagggtttggttgggtcggacgttttatttttgttaataggtaggttcgttacgttttcgtttcgtcgttaataaggaggattagtattaggtttgggaattgttgatttgttcgtttatttttttatttagatttcgttttttcgggttagcgggatatgatagatttgtgagttatttaagtttggggtaaggaggggttggtgtttgagtgagatttcgagtttcgttcgttaggttcgtcgtttagttttcggtttgggtttttagttagtagttgttggggaaggcgtaggagttggaagttatgtttgatgttacgagatcgggtattttaagggcgtgagttttttgtttttgttgttgggttttgagttttagtgtggttgtatatttttgagttaggggtgtttgatgtaagcgttttggagatttaaagagagggatagtttatatatgatttggttatagtcgtgaagttaagggaggattgaggatttgttttagagaggaggagatttagggagttggtagtttaacgttttgggggttttgtagtaatgttgttgggataaatgaggtgttcggatagggtttgtgagtaggaggtggggttgaatttatttagttttttatgggatggttgtagttaatggattcgacgtggtaatagaaggttggataaattttaaaaaattaataaattatgggttgggcgtggtggtttatgtttgtaattttagtattttgggaggttgaggcgggtggatacgaggttaggcgtttaagattagtttggttaatataatgaaattcgtttttattaaaaatataaaaaattagttcggcgtggtggtgggcgtttgtaattttagttatttaggaggttgaggtaggagaattgtttgagtttggaaggcggagtttgtagtgagtcgagattatattattgtattcgtattttagttcgggcgatagtgcgagattttattttaaaaaaaaaaattaataaattatggtttaaaaataaaaaataggttaggtaggatgatttatattttgggaggagaggtagatagattatttgaggtcgggagttcgagattagtttgattaatatgaagaaatttagtttttattaaaaatataaaaattagttaggtgtggtggtttgcgtttgtaattttagttatttaggaggttgagatagaagaatcgtttgaatttgggaggtagaggttgtaatgagttgagatttcgttattgtattttagtttgggtaatagagtaagattttgttttaaaaataaaaataaataaaaataaaaataaaaaattgtcgggtgcggtggtttatgtttgtaattttagtattttgggaggttgaggtgggtggattgtttgagtttaggagttcgagattaatttgggtaatatggtgaaattttatttttattaaaatataaaaaaaaaaaaaaattagtcgggcgtggcgatttgcgtttgtagttttagttatttaggaggttgaggtaggagaatagtttgaattcgggaggcggaggttgtagtgagtcgagattgtgttattgtattttagttggcgatagagcgagatttttaaaaaaataataataaataaataaatataaaataaaaataaaaaattggttgtttaatgtatagggggtttttttttcgggttatgaatatgttttagaattagaggtagtagttgatattgtgattgtattagatggtataaaatattgttttttgtattatatatgatatataatatgtttgtatatattgttgtatatattgtatattttgttatatagtagattatatattgttatatatatatagtattatgtagtattgtaattatgttaaattgtatatgtggttgggcggggtggtttacggttgttattttaatattttgggaggtcgaggcgggtggattagagtgtgatggcgggcgtttgtggttttagttattcgggaggttgaggtaggagaatcgtttgagtttgggagatcgaggttgtagtgagttatgattttattattgtattttagtttgggtttggttggattttgtgttaaataaaaaatagaaatattagagagataaaaggcgagcgtaggaggttgttaggaagcgggagttttacggggtgacggttatttttcgtcgtttcggggttggtttcgttgtcgttaagcggttcgtgcgcgttttcgatagtcggtcgggttgggtatcggcgtaggttcgtttttcggcggttgtatcgggtcggggtgttagcgttcgttttttcgttttttttcgtttcgtagcgcgtttacggtttgtgatttcggagatcgttttttagtgacgagagagcggggtcgggcgttgtttcggtttgatttgcgaagggatttcggtttagtattttgttgcgtcgcgttttcgttcgttcgtgcgcgggttagttaggggttagtgtgtcgaggcggtagaggtcgtagtttagaggcgttttataggtcggttcggggcgttgggagttcggtcggcggtcgggtggggtggtttttgtacgtgaaagtggtcgtttttcgcggtgtcgtcgtttatttggattttggttagtagcgtcgttatgggtttggtgggtatttatagttgtttttggattagtgagtgggtttaggtcgaggtaggttcgttcgggtatttatgttcggtcggaggtgggatttagggtgggggacgtcgcggtttcgatttagcgggcgagttcggagcgtttgattttttttttttcgttagagtatatgaattatttgatcgtgtataatagggaggtgttgtacgagtttatcgagaagcgaggttcggttacgttttttattatcgtgtttaattattagttttgtatggacgatttttatttttggggtattcgggttagtgtgttgggtagggggaggaaaggcgaggattcgggacgggtttagtttcgttagaataaattttttttcgttgtttttttatggagttttggtatttcggttttcgggcgttttgttttagggttgagatttggatttgtggtttttgtagtatttttgagggagtatgatttggagagggttttgggtatggagtaggattaaggaacggttatagggtatattttatagtttttttaacgttaggtttttagaattttttgttttttaaattatttagggttttatagttttgggaaaaatttgggggttggatataggatattttgtgaggaagttttgggttagggattggaagtttagtgttttggttttaggtttgtttttggttgggcgtgtatcgtttagttttatttgggagtttggttgttatatttagaggtttttgttttgttgattttataggaagttgtttggttttggtaattagatggtcgggtggaggggtgtttggggtttttatttttgaatagagagtttaattgttttagagtttatggggagttatttagttatattggagttttttagagtttattttggttgttgggtggagaaaggtttatagatgttataggtggattttgggaggttaggaaggaggatttggagttatttattagtttagattgggttggttgtagtgatagtatagggagaagtatagaagaatgggtattgtttaagtatgttggggaggtaggtagtttaggtgtagtgattagtaagatgtggagggtgggggagagggaggagttagggagaattgaatgatttggtttaagggtttgaaagatgttattttgggttgtagggaaatggtagtgttgttgttttttattttttgagatggggtgaaggaagggtattttttggggatatgggaagttggggtatgaagttttttttgttttttagggattttgaaatttcgttatatttggaatttgaagttgatgcgttggtgaggaggaatgggtttttcgaagtgggtcgggtcggttttatttgtttttgtttagatttgttttttttttgttttgtttaggaggtggcgtttagtagtttaggtagggtatggggtggggtatcgtaggtttttttttgtgttttttttttgtatgttgatgttgggggtagggtggtggagcggggtgtagggggtaggattaattgtatttgtttttgtttaggatttttgtagttgtaagatatttgttttattaaggagttatatttttatttttttagtttgggtaagtgtgtgtttgtgtgtcgaggtgagttgtttttttagcgagtgtagggaggtatttttggggtaggaaagttggtggttagtgtttttgttttggagggatttatgggggtaggtatttcgggagttaatatgaggtttagttttattatatgttattagagggagtagaggttgtgagaggagggatgggtttttggaaagtttttaattttttgtaattgtttagggattttgtggatttggagttttggtattagaatttaaggaggtattatttataatttttttttttagggatgttattaagagatttattgagaatagtgcgttgttattggtttatggtggtagtagtatgtatttgtaggttagagggttttgtttttaggagaataaataggtttgtggggtgagaattttaggggataggggttattttgatttttattttttagatagggaggattatagagattaagttgttggtttaaggttatggggtaggaggtgtaaagttaggatttgaatttagattgtttttttttttgtaggagtagaatttttttaagtagagaatgaggggaaaggtgttttagatataggtaggtatatgttaggtgttggaaaaagaagagagaaaggtaagttaggtatagcggtttatatttgttattttagtattttgtgaggtcgaggtgagaggattatttaagtttaggagtttgagattagtttgggtaatatagtaagattttgtttttttaaaaataaaaatattttaaataaaagaaaggtagaaaatatgagttgtatgtagaatatgaaggttttagaataattttattaagaattttggattttggttgggcgcggtgtttacgtttgtaattttagtattttgggaggttgaggttagcggattacgaggttaggagatcgagattattttggttaatacggtgaaatttcgtttttattaaaaatataaaaaattagttgggtatggtagtgggcgtttgtagttttagttattcgggaggttgaggtaggagaatggcgtgaattcggaaggtggagtttgtagtgagttaagattacgttattgtattttagtttgggtgatagagtgagatttcgttttaaaaaaaaaaaaaaaaagtgtcggttacggtggtttatgtttgtaattttagtattttgggaggtcgaggcgggcggattacgaggttaggaattcgagattagtttaattaatatggtgaaatttcgtttttattaaaaatataaaaattagtcgggcgtggtggtgtgtgtttgtaattttagttatttgggagattgagacgggagtattgtttgaattcgggaggtggaggttgtggtgagttgagattttgttattgtattttagtttgggtaataagagcgaaatttcgtttggaaaaaaaaaaaaaaaaaaagaattttgaattagttggttgtattggtgtat

SEQ ID NO: 91 - DNA, 2872 bp, Artificial Sequence
  chemically treated genomic DNA (Homo sapiens)
gttattttgtttaagttgatttcgaatttttgggttcgattaatatttagataattttggtaggcgtaggaggattaaattttagtgaatgagatcgagtttttcggtttttttttttttatgttttttttttgattggttttcgacgatttttagtgacgtttttcgtatcgttttattcgagagttagtcgttttcgttttttcgtgcgtacgcgtagtatttcgattggttttgttttagcggattgacgggtaggttagttaatggtttcgtaatataggtggagcgagttttcgaggatgtttacgattcggtttttcgttgaatatttatgagggaggcgggtcgatttcgttgtatagttcggtcggcgttatgaagtgagaagggggttgggggtcgcgttcgttagcgggcgcggggggttttgaagatggggttatcggtgggcgcgtttgggtttttaagggggcgaggggagggtgaaggggtgggacgggggtagtcgtagggagtagtagtgatagcgaggagatattgagggggtttcgaggtttttgaggatttgagggttatcgggggcgtcgggttcgttatttttttttgggttcgacgatcgggtattgtggaggcgggagaggggttgaggggacgggaattgatttagtagtttttgtcgttaggtttaacgtggacgggtttttggtttatttttcgtacgattatatttatttcgagtagtttttttatatgcgggagtttaaacgtacgttggacgttaagggttatggagttttggagatgtttttaggtatcgggaagatagtatttttgttggttttgattatggtatattagagagtatattcgttggaggtgattaaatttatttattgtttaagaattgtgttagagattgagaaggtgattgaagagtttcgaaagttgtttaatttttatgagaagtaggagggcgagaagttgtcgtttttgggattggttttgagttttcgtaaaaatttgtgtatttattttgaggtgatatttttgcgttttgggaaggacgtcgatgggaaatgttatagttttatagttttttatgtgcgggcgtagtattagtatgatattagtttgttttattgtcgattttatgaggaatttgatgtttatgggcgtgaggtgttttttttcgttggtatttataatttggatgatttgaaggttttggggcggcgttagggttggtgtttatatttttttgttcgatatttaattttgtatgttaatgtggtggtttatagttattattattttttggattttaagattgtagatttggtgtttaaggaattggttcgtaaggtcgtcgtggttttcgacgaggtttataatattgataacgtttgtatcgattttatgagcgttaattttattcgtcggatttttgatcggtgttagggtaatttggagattttgtagaagacggtgtttaggattaaagagatagacgagtagcgtttgcgggacgagtatcggcgtttggtggaggggttgcgggaggttagcgtcgttcgggagacggacgtttatttggttaatttcgtgttgttcgacgaagtgttgtaggaggtagtgtttggttttattcgtacggtcgagtattttttgggttttttgaggcggttgttggagtacgtgaagtggcggttgcgtgtgtagtatgtggtgtaggagagttcgttcgtttttttgagcggtttggtttagcgcgtgtgtatttagcgtaagttttttagattttgtgttgaacgttttcggtttttgttgtatattttggagattatcgattttgttgattttttttcgtttattttttttgttaattttgttatttttgttagtatttacgttaaaggttttattattattatcgagttttttgacgatagaatttcgattattgttaattttattttgtattttagttgtatggacgtttcgttggttattaaattcgtatttgagcgtttttagtttgttattattatatttgggatattgttttcgttggatatttattttaagattttggatttttatttcgttattatggtaatttttattatgacgttggtacgggtttgtttttgttttatgattatcggtcgtggtaatgattaggtggttattagttttaaatttgagattcgggaggatattgttgtgattcggaattatgggaattttttgttggagatgttcgttgtggtttttgatggtatcgtggttttttttattagttattagtatatggagagtatcgtggttttttggtatgagtaggggatttttgagaatatttagaggaataagttgttttttattgagatttaggatggtgtcgaaattagtgtcgttttggagaagtattaggaggtttgcgagaatggtcgcggggttattttgttgttagtggttcggggtaaagtgttcgagggaatcgattttgtgtattattacgggcgggtcgttattatgtttggcgttttttacgtttatatatagagtcgtatttttaaggcgcggttggaatatttgcgggattagttttagattcgtgagaatgatttttttattttcgatgttatgcgttacgcggtttagtgtgtgggtcgggttattaggggtaagacggattacggttttatggtttttgtcgataagcggtttgttcgtggggataagcgggggaagttgtttcgttggatttaggagtattttatagatgttaattttaatttgatcgtggacgagggtgtttaggtggttaagtattttttgcggtagatggtatagtttttttatcggg

SEQ ID NO: 92 - DNA, 2872 bp, Artificial Sequence
  chemically treated genomic DNA (Homo sapiens)
ttcggtggaagggttgtgttatttgtcgtaggaagtatttggttatttggatattttcgtttacggttaggttgaggttggtatttgtgaggtgtttttggatttagcggggtagtttttttcgtttgtttttacgggtaaatcgtttgtcggtaaagattatgaggtcgtagttcgttttgtttttgatggttcgatttatatattgggtcgcgtggcgtatggtatcgaaggtaagaaagttatttttacgaatttggaattggtttcgtaggtattttagtcgcgttttgagaatgcggttttgtgtgtagacgtaggggacgttaaatatgatgacggttcgttcgtagtggtgtataaagtcgattttttcggatattttgtttcgggttattgatagtaggatggtttcgcggttattttcgtaggttttttggtatttttttagggcgatattggtttcggtattattttgggttttaataaagagtagtttgtttttttggatgtttttaaggattttttgtttatattaggaggttacggtgttttttatgtattggtagttggtgaagaaggttacgatgttattagggattatagcggatatttttagtaggaggtttttatagtttcggattatagtaatattttttcgggttttaaatttggagttgatggttatttggttattgttacggtcgatgattatagggtagaggtagattcgtgttagcgttatggtgaaggttgttatggtgacggggtggaagtttaggattttggggtagatgtttagcggggatagtgttttagatgtgatgatgatagattggaaacgtttaaatacgggtttgatggttagcgaggcgtttatgtagttgaagtgtaggatggggttggtaatggtcggggttttgtcgttaaagggttcgatgatgatggtgaagtttttggcgtaggtgttgataagggtggtaaagttagtaaggagggtgagcggggagaagttagtaaggtcggtgatttttagagtatgtagtagggatcggaggcgtttagtatagaatttgaggggtttgcgttggatgtatacgcgttgggttaggtcgtttaggaaggcgggcgggtttttttgtattatatgttgtatacgtagtcgttattttacgtattttagtagtcgttttaggaagtttaggaaatgttcggtcgtgcggatggagttaggtattgttttttgtagtatttcgtcgggtagtacggggttggttaggtgggcgttcgtttttcgggcggcgttggtttttcgtagtttttttattagacgtcggtattcgtttcgtaggcgttgttcgtttgtttttttgattttgagtatcgttttttgtagggtttttaggttgttttggtatcggttaagggttcggcgggtgaggttgacgtttatggagtcgatgtagacgttgttaatgttgtgggtttcgtcgaagattacgacggttttgcgggttagttttttggatattaggtttgtaattttggggtttaggaggtagtggtagttataaattattatattggtatgtaggattgagtatcgagtaaggaagtatgggtattagttttggcgtcgttttagggtttttaggttatttaggttgtagatgttagcggggaggggtattttacgtttatgggtattaaattttttatagaatcggtagtggggtaggttggtgttatgttggtattgcgttcgtatataggaggttgtgaggttgtggtattttttatcgacgttttttttaaagcgtaggggtgttattttagggtgaatatataagtttttgcgggagtttagagttagttttagaaacggtagtttttcgtttttttgttttttatagaagttgagtaattttcgaagttttttaattatttttttaatttttggtatagtttttgagtagtagatgagtttggttatttttagcggatatgttttttggtatgttatgattagggttaatagggatattgttttttcggtgtttgagggtatttttaggattttatgatttttggcgtttagcgtgcgtttgagttttcgtatgtaggagaattgttcggggtagatgtagtcgtacgggaagtagattaggagttcgtttacgttgagtttggcggtaggggttgttgggttagttttcgtttttttagtttttttttcgtttttatagtgttcggtcgtcgagtttagagaagggtgacgggttcggcgttttcggtaatttttaggtttttaggagtttcggggtttttttagtgttttttcgttattattgttgttttttgcggttgttttcgttttatttttttatttttttttcgtttttttggggatttaggcgcgtttatcgatgattttatttttaagatttttcgcgttcgttagcgagcgcgatttttagttttttttttattttatggcgtcggtcggattgtgtagcggggtcgattcgttttttttatgaatatttagcgagaggtcgggtcgtggatattttcgagggttcgttttatttatattacgagattattggttaatttgttcgttaattcgttagggtagagttaatcgggatattgcgcgtgcgtacggaaaagcgagggcggttgattttcgggtgaggcggtgcgggaggcgttattgaggatcgtcgagggttaattaaaaagaaaatatggaagggaaagagtcgagagattcgattttatttattagaatttggtttttttgcgtttgttaagattgtttgagtattgatcgaatttaggagttcgagattagtttgagtaagatagt

SEQ ID NO: 93 - DNA, 10144 bp, Artificial Sequence
  chemically treated genomic DNA (Homo sapiens)
  unsure (840..841, 1150, 1878, 7754..)
ttattttgattatggttcgttggtggttattaataaaatattttggattttataagttttacgtttgaattttataagatttgtattttattaattagttatacgcgggttgatattgaaaggtatatgttgatatttgttcgtttaggggaaatttattatttttttattttagttagggggcggcgtgtaggtcggaattttttaacgagcgcgtttttttttattttttgggttcgcgtggattttcgtttatttttatacgttttggaggggggtcgggtttatacgttttggaagtttttagaggtgattttttttgggatttttgtattagggaggaaggatatcgttattcgttattattatttttcgttagaagttttttcgtgatttttttgcgcgtgtttttttatattttttcgttcgggattgcgaggagtgggcggtcgattcgagttcgtagtttaggttttttatacgtttttttttgtcgttagtatttattcgcgcggtaggtcggcggttggcgggcggtcgtttttaaattttcgggtttatttgtatggtttcgttttttgagtgatacggttggcgcgggcgggttcgttttttttgtttttgggtcgttttttttaagtttttttgagtcggtgttgcgtttttttaattgggatttcgagtcggggttatttttggcgttggcgttttaagaaggcgtgagttcgcggtcgtttcggtggttttttttttttatatttataatttaattaaattatttatttattgaggtcgcgtacgggtcgtgtttagttttttgtttttcgttatttttcgggnnagggggaatatttttgttttttcgtttggttgtgatatataaatatttcgcgggggtttgggcggcgagtacgcggcggcggcggtttttgagcgtttttgttttttttttcggttttagattcgtatttgttattagcggcggtcgcggcggagtaggcgcgtttttagcgtttagtatcgtcgttttcggtaattcggagcgcgtatcgtaggtcggcggtcgagttcgcggtgagtcgttttcggggttcgcggcggcggcggcggaggggggcgttcgcgtttcgttcgacgtcgtttttttttnagtcgttcggggttgtagcgcgcgtcgtcggttttatttttaggtcggggcggcgcgatcggcggcgggggagggtcgcgcggcgcgggggcgggcggcggggttcggcggcgcggggaggacgttcgtatttttttttcgcgtcgcgggcgtttgcggggggcggggattcgggaaaggcgcgcggtgggggagggggcgcgtagttgcggcgagcgcgagttgtgtattcggcggagttcggaggagttcggcgtatttcgcgcggcggtcgttttcgttggagtcggagttcgagttcgagttcgagttcgggttcgggtgaggggcggggagagatacgggttgcggcgcggtaggagagtggggggtcgggcgtttttcgtagtttagggaagttttggaagtgagggagatggggaggaatttttaaattcggttttacgttttttcggtttttttttcgcgtttttttcgtagatgaggtcggagcgcgggtttgggtttggggttttatttcgattttatttttggtttggttcgcgtttttttagttttaggggtcgggtttgtttttcgtttttataaattggtttcgttgttttgttgggttttgttggaattagtttttttgatttttcgtttttattttatttttttttggggttttattttgtcggggaggggacggagggagggggttttttttttttttttcgcgttcgcgnttaggttttttgttttaaggcgggtttgggtgttttttttggtaggaagtggggtcgggtgtattcgcgtggcgtgtatgcggtcggggtgcgttgttttttcgcgtttgtaggagcgtttgcgttttttttttcgcgcgttttggtttcgggtttcgtcggcgtttgtaacggtcgggcgtagatatttgtagagttattttcgggtcgggtttggagtttgatgtttcgggggtttagttttagtcgttaggcgggtaggtaaagtgtcggattgaaagggttttcgggaatttatttttttttgttcgttaatttgttgtgtgattttaggtaatttaaggtttttttgggttatttttttacgggggacggggaagaaaataagggaatttttaagataattttttagggttttttttgtagagtttttaagtatttgaggagtatagtttgtatgtatagtgtatggaggagataggtttgaggttaagcggcgttattataaagtgagggattggggttaggttttaaatgtagtttttttaagataggtttttgatgtttagaaataggtggaaaagacgaacgttttttggttttattggaaagggtttcgggttttatttagttcgtggggggttggttgaggggattaaagggtttttagtagtaagaggtggggggaggtattagatggtatgagagtttttagggagattcgttaagatttttaggtagtcgggttagttttttgggatttcggattgtttcgtttaattggaattttttcgatgagggggttttaagtagattttatatgaggttagtattcgtttagttgattaattttgatgtttagtttgaaggggatttgtggtgtaatataagattttaattattgtttgtaattgtagagtagttaagttattaatgacggagtaggataaattattaattattttgtttaaaagggtttttaagtttgaaatattataagatagaataattattaaagttttgttgtttggagggttttttgatgtttgaaaatggaggttttgggttttttagaaattataagtttgtaaaaatgtttttttttttttattggggtaaaaatttttttttttttttttttttttttttttaaattagatatgggagttttatcgtattgtttaggttggtttcgaatttttgattttaagtagtttttttgttttggtattttaaagtgttgggattataggtatgagttattttatttggtttataaattatttttaaatggtttagtttttattttggttagagtgaagatttttttttattattttaagtttttttaaattattatttagtttgatttttgaagtagttaggaggtagtttaggtaggtattttataattattttgattttatagattgagaggggtttagaagtggagtcgtttgttttattttttattatggtaggtagggattggttattggaaaaatgtgtagtttaggttttcggcgttttatttatttgtagtttggggataaggattaggataagaagatgtggaggattgttttttttaagtttgtaatatagggtatttttaaatataggttgtaggttttttttttaatgagaagttttaggaaaatttaaaattgatggggttaattaaattttaataggtttttaagaagaaggaagatgttagaaaatgattaagaaggttttaggatgagttttaaattttattttaaaggatgagggttagttagggtttgttaggcgggtgtattttagttggagaattttttatttatttgataaagttttatttgattttagttgggtagaggagggggtaaggggaaagaggagggtggtttttggttttgggtttattttttttttttatttatttattagttttaattattttttttttttttaattatattaatttgaattttttagggatttattttgggtgagaatagagaagagagttggtggtgggtattatttttggttgtgtgattggttttttttggttttgagttttgtattttgttagataggtaatattgttagtgaggtgggtaggggattaatgtttatagttgttagatcgtaaggttttattttttttatttttttattgaattgcgtaggttggatttttttttaaagagaaagggtagtagttgattatagaaggaggggatgttggtaatacgttagattttatttttttatatttttgttttagggtggttttatttatgtagttaggtttgggttggttgtattttttggattttttttattacgttgtattggggcggtgttaaggtaggataataaagagtttttttgaataggagatagataagaagttgattagttaacggttttttttcgtttttggtagtatttgggggtgggtagattttttcgtattttgggtagagtaggagtttgggggtttatgggagtatagttttttgtagtgtgttttgaaggtgtgggtgatgagggggtagaaagtggttgaagcgagatgtttgtttaaaagtatttttttgttttttagtattttagttattatttttttatttgttttttagagaagggaagatgagtgagtcgagttcgaagtttagttagtttttggtttttaagtaggaaaaggacggtattgagaagcggggtcggggtaggtcgcgtaagtagttttcggtgagtttcgggatagcgttggtagggagttaggtgggtgtttaaatttttgttttatttggtttattttttggggttagggaggtgtttggagttttatttagtaggcgagattatgtatggagggtgtagaatgattttgcgtagtaagcgtgtgggtgtgtttttttatttgtgtgtatttttgttttatttgtaattttggttagatttttatagagattttaggagagaatcgggggtcgaggaatttaagataaattttgaagttaatggtaaatagtttaaatttaaagtattttagaggttatatggttagtgtttaaaatattcgttttttttttaatttttaatttattgtggattagtaattttaaaatgtagtaaagacgaatgaataaaaatgaatatagaagtttagggtttttaattattagatttagtgtacgtaaaatgatttttgttaatttgttgtaaagttgttgaatatttatggtcgatttttgtatttttttatttttaggtgagaaacgggtgtttgcgtgggttagtatttgtttgtgtataggttagttatgagtagttttggaatgggtattgtttttggttttttagatggaaattgaagtttaagaagttaaaaatgttggggagttggtggtagtgatttttagaattttggtgttgttttttttataaagtttttatagaaggatgaggttgttagtttggcgttgtggggtattttagggagtatggttatttgggtatgggggggattttatattgtcgttttatagaggtagttgttatttaagtgaagggtggttgttggtgaagtttagttattttttttttttgggagagaggtaagaggagttgagttcgatttttgttttttaaatatgatataggttgtttatttgtaggttttttttgttcgtacggtggagagtggtttgtgttgatttgggtttagggagatacgagttgtgaggagtttgttgtgttggaatttagagtttggggtggggttatttgtttttttagtttagtttttttagttttttttttttattttatttgttagttatggttagtgggaggtgttaggaggggtgtagggttattggattttggttatagatagattatgggcggttttttaggaaatagtagttggtcgtcgtttttattatatattttatatgtattatgtagtagttttttattttatttacggtttattaaaattttagtgggaatgatggtagggatttttggagttcggttataattttttttttttgggggttagtttggatgggttttaggtttgtaagtgtaggtagggagtgtgtgtttagtataggttatttgagagggtgggtagtgattatggtttagtgttagataattatatattatttatttaatttttatgatattttgtaagggaagtttttattatttatagatgaggaaattgaggttttagtattaagtgttttatttaagataagtgttagaattgagatttggtagagttatttaattgtttttttgtttttagaatgttttttttaggggttttttgggtttttgatattttgtattttagaaatttgtagggaagtaaggggagaggtgggaggtattttgtaaagatgtttaaattggagttttggattttgaagggatttttaggttagggatggtttgtggtttttggtttttgttgatttaattttgttgaggaggtagagggttgtgttttttgagggggtggaaataggtgatgattgtttttgattattttttttgtttttatagaaggagtttagcgaagtgttaatatttaagagatttcggggtcgattaaagggaagtaaaaataagggtgttgttaagattcgggtgagatttgagatgggattatttttgggtggatgattagtagaggatttttttgttggtattatggttacggttgtggggaggtttgggaaggggtttagttattttagttgtgtatttttttttttggtatagggatggtagtgagtttttgttaattggggagagtggggcgatgattaaggttttatttttggggggttggttttgtttaggatattgcggagattaggttagaagttttatagtttttttgattttagagaagggtagagtggggagaatggagggtttttgttagtttttgggttgagaatgttatttttttttggggttttttggagtttgaaggggtggggataggtagtaaaggtttagatttatagtgatattagttttttagaaaagttgttttgttttttattttattttttttaagatacgatttatattttttgagttatgggcggaggtgggagtagggggtcgtgtgtgtatgtcgagggggtaaatgtggttggttagttattgttagttggatttgggtgggtttgttgggtgagagtgttgggttattttgaataggtaggtaggtttgttttttattattattgggtatcgggtgagtattgatgagtattttggatttaggagatattttttttaattttttagaaaattattataattttaggaaggaaattaaggggtagatttaaaaaattggtaggtgaagaagtagattgttgtttgttttttgggtttttttgagtgagggtgttgagtatatagtatttgatgttatgtattttttatggaaaggttttttttgatttgttgggatattagattttatagaagtttagagaggggaaggtatttggtttgggttgtgtttatgagaagtgaggggttttaggtataaattagattatatttttttgttttgttttgttttagttgtgtgtgggggttttttttttttttgtttttagaatatttagaatttttaggggagattttggaagttatttagtttgtgttttttttaattagagatgaggaaaggaagttatagggggaaggtttgttttttttatgagtttttgtagaagagaaatagcgaaggagttgggttttgggaggggtcggtgttggagttttgatgtgatttattatattgtattggagggtattatttaattttgggnntttaaatagttggtggaaaggttcggtgggttgagttaagaagttgtttttagggggttattgtagttagggttattttagttttttagtttttggtttttttttatttttagtttgtttttttaaatttttgaagttgttattttttgagttgagttattgttggggtgggggggttagggggtgttgttggttaggttttaagagtgagtaataggaaataagttgttttggagtttgtgtttggttcgggggttgtagtcgtgtggtgtttatattttcgtttagtgagtgagttcggcggtatatattttttttttttttttatttcggtttagggttagttttcggttatttcggagggttagggtattatagtatagtatttagtttttgtgggttaaggatttggtttttttgtatttattagcgggtttttgtattttttagttatttttttttatttttttttttagttattttttttttattttttttttttttttagggagttagttatattttgaagtttattgttgttttgagttttgtttttttgttttttttgggtttgggggttaagggggtttggtttttggttttgggtgagagtagtatgtgtgtggggtttttttttttttttaaattttttttatgaatgaagtcgggcgcgtggaggttgttgagttatttacgacgatttagttttgatttatttttttttaggagagttagggagtgtagggagcgggtggggttagtttttgggggtggaagagggggttatcgggttagagtttatattaataattgtttattttataggagaaggaggaagaggagggtatttcgtaggagttttcggaggaggagtagtgatttatgcgtgtcgtttgttttttattggaggagtagtttttttttgggattggatagttttgtttcgtttttatcgttttcgttttttttttaggtttattattattatcgtttttggtcgttatttttattttttatttgtgtttttattattatattatatagtatattagtcgttgtagggtttttatgggttgagtggggagtagtttttttttggttttagtttttagtttttttcgtttatttacgtatatatatatgtttttttggataaggttaatattttatttagtcgtattttgtatttgttgcgtttttatttttttggtggtggggatattgttttttgggtttttggtttgggggcgttttttttgtttttttattgttttttttggttttttatagtggggtttgggagggtttttttggttttaaaaggggtttaagttattttattttggtacgttttattttattgttttggtagtagtaggtgtggttaatggaggggggtgttggtttttaggatttttttagttaaattgtttttgttattacgtggggtttattttttatttttttttaatttttttagttttcgtattaggttggatagtttttttcggttataggaaggtaggaggggtgagttttttattttttttttattgtggttatagtttttttgtttttcgtttgggatttgagtatatattgtggtgatggagatgtagttatttattgtttaggtgaggtttaagagttttgtggtcgttatttgaggtgggttggggttgtttttttaattttattttcgtttcgttatttagttatttttttttttttagatggggtattaataataaggagtttattttgttcgtttttaattttttttttgtttttttttgttttttaaggttttggttttattttttttttgtttataaattatttttggatagttgtgttgttttttgtttaatgttttatttttcgatattcgttattgttgttgttattagcgttaaatgtttatttttattgttttttgttttgtttacgatttttttttttaagatattttttgtggggaagaggggttggggtatggtaggttgggtgatcgattattttagttttagggaaggtggggttttgtttttaggatgttgtagtagagtgagtaagggggttcgaatcgattataaagggtgtaggggttattttttttttttgttttgttggggaggggtagttatgatttgttttagtttggggttttttttttggttttttatttgtagttatttgaataaaaaaaatatttttttttggattggagttttttgtggtgtgtgtttttaaagttttggggtaggtaggatgggtgatatttgtgttgtggtttttatttttttggttgtaggaagggaggggaaatagtattggaattattttcggggaaggttattttaagttttttgatgaaattaaaattttt

SEQ ID NO: 94 - DNA, 10144 bp, Artificial Sequence
  chemically treated genomic DNA (Homo sapiens)
  unsure (2390..2391, 8267, 8995, 9304..)
aggggttttgattttattaagaggtttaaaatgatttttttcggaggtgattttagtgttattttttttttttttttgtagttagaaggatgggggttataatataagtgttatttattttatttgttttagggttttaggggtatatattataggagattttagtttagaaaaggatattttttttatttaagtaattgtaaataggaaattagagagggagttttaggttgggataaattatggttatttttttttaatagaatagggggaggaggtggtttttatattttttatggtcgattcgggtttttttgtttattttgttgtagtattttaggggtagggttttattttttttgggattggggtagtcggttatttagtttgttatgttttagttttttttttttataaagagtattttgggggaggggatcgtgggtagaataggaggtaatgaggatgaatatttggcgttggtagtagtagtaatgacggatgtcgaagaatggaatattgaataaaaaataatataattgtttagaggtagtttgtgaatagaggaaaaatggaattagaattttggggggtagggaggagtaggaggggggttgggagcgggtagggtgagttttttgttattggtgttttatttgaggagggggaaatggttgagtggcggaacgaaagtagggttaggggagtagttttagtttattttaggtggcggttatagggtttttgggttttatttggataataagtgattgtatttttattattataatatgtatttagattttaggcggagggtaagggggttgtggttatagtgaagagggagtaggggatttattttttttgtttttttgtagtcgaagggggttgtttaatttagtacggggattagggaagttggggaaggatgaaaagtgagttttacgtggtgataaagatagtttggttgggggaattttgggggttagtatttttttttattggttatatttgttgttgttagggtagtggagtagggcgtgttaggatgagatggtttgggttttttttaaggttaggggaatttttttaggttttattatgggaagttagagggaatagtgaaggagtagagagggcgtttttaaattaaaagtttagagagtaatgtttttattattaagggagtggggacgtagtaggtgtagggtgcggttaagtgggatgttagttttgtttaggagggtatgtgtgtatgcgtgggtgggcggggggagttgggaattgaggttaggggaaaattgttttttatttagtttatgggagttttgtagcggttggtgtgttgtgtagtgtggtggtgagggtataggtggaagatgggggtggcggttagaggcggtggtgatggtgggtttggggaaggggcgggggcggtgggagcggagtaaagttgtttagttttagaaggaagttgtttttttagtgaggagtaggcggtacgtatgggttattgtttttttttcgaggatttttgcgagatgttttttttttttttttttttttgtgaggtgggtagttgttggtgtgagttttggttcggtggtttttttttttatttttagaggttggttttattcgttttttgtattttttggtttttttgaagagggatgagttagggttgagtcgtcgtgggtgatttagtaatttttacgcgttcggttttatttataaaaagaatttaaaaggaggaaaaaattttatatatatgttgtttttatttagagttaggagttaagtttttttggtttttaggtttagggagggtaggagggtagagtttagggtagtaatgagttttaggatgtgattgattttttaggggagaagaggaggtggggaagaggtggttgggggaggaaatgggaaggggtggttggaaggtgtaagagttcgttggtgggtgtaggggaattaggtttttggtttataggggttagatgttgtgttgtggtgttttggtttttcggggtggtcgagggttgattttaggtcggggtggggaggaaggggaagtgtgtgtcgtcgggtttatttattgggcgggaatgtggatattatacggttatagttttcgagttaggtataaattttaaaataatttgttttttgttatttatttttggggtttggttagtagtattttttaatttttttattttagtagtggtttagtttaaggaatgatagttttagggatttgagggggtaggttgggggtaggagagggttaggagttggaaggttggggtgattttaattgtagtggttttttagaggtagttttttgatttagtttatcgagtttttttattagttgtttgggnntttagaattggatggtgttttttagtgtagtgtggtgggttatattagaattttagtatcgattttttttagggtttagttttttcgttgttttttttttgtagaggtttataggaaggataaattttttttttatggttttttttttttatttttaattgagggggatataggttagatgatttttaagattttttttagaagttttgagtattttaggagtaggagagggagggatttttatatataattagggtagggtagggtagggggatgtggtttgatttatatttgggattttttattttttatgggtatagtttaggttaggtatttttttttttttggatttttgtaaaatttgatgttttagtaggttaaggagagtttttttatagggggtgtatagtattaggtattgtgtatttaatatttttatttaaaagagtttaggaggtaagtagtagtttgtttttttatttattagttttttgggtttgttttttggttttttttttggagttgtggtggttttttagagggttagagaaaatattttttaagtttaaaatgtttattagtgtttattcgatgtttaatagtgatggggggtagatttatttgtttgtttagggtgatttaatatttttatttaataggtttatttaagtttagttggtaatgattggttagttatatttgttttttcgatatatatatacggttttttatttttattttcgtttatgatttagaggatatgagtcgtgttttagaaaaaataaaataaaaaataaaataatttttttgaaaggttaatgttattgtgaatttgggtttttgttgtttgtttttatttttttaggttttagggaattttaagagaaggtaatatttttagtttagggattggtagggattttttattttttttattttgtttttttttaagattaggaaagttgtgggatttttgatttgattttcgtagtgttttgggtaggattaattttttagaagtaagattttagttatcgttttattttttttagttagtaaagatttattgttatttttgtattagggaagggggtatataattgagatgattgagtttttttttagatttttttatagtcgtggttatggtgttaataagaggattttttgttagttatttatttaggggtagttttattttaagttttattcgggttttggtagtatttttgtttttgtttttttttggtcggtttcgaggttttttaggtgttggtatttcgttgggttttttttgtaaagatagagggggtagttagggatagttattatttgtttttatttttttagaagatatagttttttgtttttttaataaggttaagttagtaagaattaagaattataaattatttttgatttaggaatttttttaggatttaaagttttagtttgagtatttttgtaaagtgttttttatttttttttttgtttttttgtaggtttttaagatgtaaaatgttaagagtttagaagatttttaggaaaggtattttggggatagaaagatagttaggtggttttgttaagttttagttttgatatttattttgggtgggatatttaatgttggagttttagtttttttatttataaatggtgaagattttttttgtagggtgttatggagattaaatgggtaatgtatggttatttagtattgggttatgattattgtttatttttttagatgatttatgttggatatatattttttgtttgtatttgtaaatttggagtttatttaggttggtttttagagaaggggaattatagtcggattttagagatttttgttattatttttattgaaattttaataagtcgtagatagaataaaaagttgttgtataatgtatataaggtgtgtggtgaaggcggcggttagttattgttttttagggggtcgtttatggtttgtttataattagggtttagtaattttgtattttttttgatattttttattgattatggttaataggtggggtaggaggggagggttgagggagttaggttaagaggataaatgattttattttaggttttgaattttaatatagtagattttttatagttcgtgtttttttgggtttaggttagtatagattattttttatcgtacggatagggaaaatttgtaggtgaataatttgtattatgtttaaggggtagaggtcgaatttaattttttttattttttttttagggaagggaagtaattgggttttattaatagttattttttatttgggtgatagttgtttttgtaagacggtaatatggggttttttttatgtttaaatggttatgttttttagggtgttttatagcgttaggttggtagttttatttttttatgaggattttgtggggagagtagtattagggttttgagggttattgttattaattttttaatatttttgattttttgggttttaatttttatttaaagagttaggggtaatgtttattttagaattatttataattggtttgtgtataaataggtgttggtttacgtaggtattcgttttttatttggggatgaggaagtataagaatcgattataagtatttagtaattttatagtaaattgataaaaattattttacgtgtattgaatttaatgattaaaaattttgggtttttatgtttatttttgtttattcgtttttattgtattttaaaattattggtttatagtggattggaaattaagaaaaaggcgagtgttttaagtattggttatgtgatttttggggtgttttaggtttggattgtttgttattggttttagaatttattttgaatttttcggttttcggtttttttttggggtttttatagagatttgattagggttgtaagtggggtaggagtatatataggtgggaggatatatttatacgtttattgcgtagaattattttgtattttttatgtatggtttcgtttgttgaatgaaattttaggtatttttttagttttaaagggtaaattaagtgaagtaaaggtttggatatttatttgattttttattagcgttgtttcgggatttatcggaggttgtttgcgcggtttgtttcggtttcgttttttagtgtcgttttttttttgtttggaggttaagggttggttggatttcgagttcgatttatttatttttttttttttaaggagtaggtggaagagtgatggttgggatgttgggagatagaaaagtgtttttagataaatatttcgttttagttattttttatttttttattatttatatttttaaggtatattgtagaaaattgtgtttttatgggtttttaggtttttattttgtttaggatgcggaggggtttgtttatttttagatgttgttaagggcggggaagggtcgttggttaattagttttttatttattttttgtttagaagggttttttgttgttttgttttaatatcgttttagtgtagcgtggtggggggggtttaggaggtatagttagtttagatttagttatatgggtgaggttattttgggataaaggtgtggggaggtgagatttgacgtattgttagtattttttttttttgtagttaattgttgttttttttttttaagagaaaatttagtttacgtagtttagtgggaaaatggaaagaatgagattttgcgatttggtagttatggatattgattttttgtttattttattgataatattgtttatttggtaaggtgtaagatttaggattaaaaagagttaattatatagttaggggtggtgtttattattagtttttttttttgtttttatttagggtaaatttttggagaatttagattggtataattgaggagggaggagatggttgaagttagtgggtgagtgggggaggaaagtgagtttaaagttaaaggttatttttttttttttttttatttttttttttgtttaattggagttagatgggattttgttagatgggtagggaattttttaattgaaatgtattcgtttaatagattttggttggtttttattttttaggatgaggtttagggtttattttaaaatttttttggttattttttagtattttttttttttttagaggtttgttggggtttaattaattttattaattttgagtttttttaaaattttttattggaaggagggtttgtaatttgtatttgggaatattttgtattataggtttaaaaaggatagttttttatatttttttattttagtttttatttttaggttatagatggatgagacgtcggaggtttaggttatatatttttttagtaattaatttttgtttgttatggtaaggggtgggataagcggttttatttttgaattttttttaatttgtaagattaaggtaattataaggtatttgtttgaattattttttgattgttttaaggattaaattaggtaatagtttagaaaaatttaaaataatagaaagaaatttttattttaattaaaataagaattagattatttgaaaatgatttatgggttaggtgaggtgatttatgtttgtaattttagtattttgggatgttaaagtaggaggattgtttgaggttaggagttcgagattagtttggataatacggtgggatttttatgtttaatttaaaagaaaaaaaaaaaagaagaaaaagagtttttattttaatgagaggaaaaaaatatttttgtaaatttgtgatttttagagggtttaggatttttatttttaagtattaagagattttttagatagtaggattttggtaattattttattttataatgttttagatttggagatttttttaaataaggtggttggtgatttattttgtttcgttattagtggtttggttgttttgtaattataggtagtgattagaattttatattatattataggttttttttaaattaaatattaaaattaattaattaaacgagtgttgattttatataaggtttgtttggggtttttttatcgagggggttttagttgggcgaagtagttcggaattttagagagttggttcggttgtttggagattttggcgggtttttttggaagtttttatattatttggtgtttttttttattttttgttgttggggattttttaatttttttagttaattttttacgaattaaatgaagttcgaggttttttttagtgaggttaagaaacgttcgttttttttatttgtttttgaatattagaggtttgttttggaggaattatatttagggtttaattttaattttttattttgtaataacgtcgtttggttttaagtttgttttttttatatattgtgtatgtaaattgtgttttttaaatatttaaggattttgtaggaaaggttttaggaaattattttgggggtttttttgttttttttttcgtttttcgtaaaaaagtagtttagagaagttttgagttgtttaaggttatatagtaagttggcgagtaggaagaagtaggttttcggagatttttttaattcgatattttgtttattcgtttagcggttagggttaaattttcgaggtattaggttttagattcggttcgagggtgattttgtaagtgtttgcgttcggtcgttgtaggcgtcggcgggattcggggttagggcgcgcggggggaggggcgtaggcgtttttgtaggcgcgggaaagtagcgtatttcgatcgtatgtacgttacgcgggtgtattcggttttattttttgttagagggggtatttaagttcgttttggggtaggaaatttggncgcgggcgcgggggagaggaagaaagtttttttttttcgtttttttttcggtaaaataaagttttagaagaaaataaaatagaaacggggagttaaagggattagttttaatagagtttagtaaagtagcgaaattagtttgtgggggcggagggtaggttcggtttttggggttgaagaggcgcgggttaggttagaggtggggtcggggtgaagttttaaatttaggttcgcgtttcggttttatttgcggagggggcgcgagagaaaggtcgagagggcgtagggtcgaatttgggggtttttttttattttttttatttttagaatttttttgagttgcggggggcgttcgattttttatttttttgtcgcgtcgtagttcgtgttttttttcgttttttattcgggttcgggttcgggttcgggttcgggtttcggttttagcgggagcggtcgtcgcgcgaggtgcgtcgggttttttcgggtttcgtcgggtgtataattcgcgttcgtcgtagttgcgcgtttttttttttatcgcgcgtttttttcgggttttcgtttttcgtaggcgttcgcggcgcggggaaggggtgcgggcgtttttttcgcgtcgtcgggtttcgtcgttcgttttcgcgtcgcgcggttttttttcgtcgtcggtcgcgtcgtttcggtttgggaataaagtcggcggcgcgcgttgtagtttcgggcggttngaggaggggcgacgtcgggcggggcgcgggcgttttttttcgtcgtcgtcgtcgcgggtttcggggacgatttatcgcgagttcggtcgtcggtttgcggtgcgcgtttcgggttgtcgggagcggcggtgttgggcgttgaggacgcgtttgtttcgtcgcggtcgtcgttggtagtaaatgcggatttgaaatcgggagagagagtagaggcgtttagagatcgtcgtcgtcgcgtgttcgtcgtttaggttttcgcggggtatttatgtgttatagttaggcggggggataaaaatattttttttnnttcgaaggatggcgaggggtaggaagttgggtacggttcgtgcgcggttttaataaataaataatttaattaaattatagatataaaaaaaagaagttatcggagcggtcgcgaatttacgtttttttggagcgttagcgttagaaatagtttcggttcggagttttaattagaggagcgtagtatcggtttaggggagtttaaaaagagcgatttaggggtaggggggacgggttcgttcgcgttagtcgtgttatttagggggcggggttatgtaaatgagttcggggatttaaaagcggtcgttcgttagtcgtcggtttgtcgcgcgggtgggtgttgacggtagggaggggcgtgtgggaggtttgggttgcgaattcgagtcgatcgtttatttttcgtagtttcggacgaggaggtgtgggaaggtacgcgtagaggagttacgaaggagtttttggcggggggtggtggtgacgggtggcggtattttttttttttggtataggggttttagggagagttatttttaggggtttttagggcgtgtgggttcggtttttttttagggcgtgtgggggtggacgggggtttacgcgggtttagggggtgaagagaaacgcgttcgttagagaatttcggtttatacgtcgttttttaattagaatagagagatggtagattttttttgggcggataggtgttagtatgtgttttttagtgttaattcgcgtgtggttgattggtgagatataagttttgtgaaatttaaacgtgaaatttgtgaaatttaaagtgttttattaatggttattagcgagttatgattaaggtgg

SEQ ID NO: 95 - DNA, 20 bp, Artificial Sequence
  MLH1 primer
tttaaggtaagagaataggt

SEQ ID NO: 96 - DNA, 20 bp, Artificial Sequence
  MLH1 primer
aaacaacttaaataccaatc

SEQ ID NO: 97 - DNA, 18 bp, Artificial Sequence
  MLH1 detection oligo
ggtttgtacgagtagttt

SEQ ID NO: 98 - DNA, 18 bp, Artificial Sequence
  MLH1 detection oligo
ggtttgtatgagtagttt

1-38. (canceled)

39. A method for ascertaining genetic and/or epigenetic parameters for the diagnosis and/or therapy of a disease or the predisposition to the disease by analyzing cytosine methylations in genomic DNA, the method comprising the steps of:
a) in a genomic DNA sample, converting, by chemical treatment, cytosine bases that are unmethylated at the 5-position to uracil or another base dissimilar to cytosine in terms of hybridization behavior so as to define chemically pretreated genomic DNA;
b) amplifying fragments of the chemically pretreated genomic DNA using a set of primer oligonucleotides and a polymerase to produce amplificates, and
c) analyzing sequences of the amplificates to determine a methylation status of genomic CpG sequences, wherein the genomic CpG sequences are located within at least one sequence associated with DNA replication.

40. A method according to claim 39, wherein the at least one sequence associated with DNA replication is taken from the group of Seq. ID No. 1 to Seq. ID No. 98 and sequences complementary thereto.

41. A method according to claim 39, wherein the at least one sequence associated with DNA replication is a gene associated with DNA replication selected from the group consisting of CENPB (X05299), DNA2L (D42046), ATR (NM_{—}001184), CHD1L (NM_{—}004284), ERCC3 (NM_{—}000122), SNRPA1 (NM_{—}003090), RAD50 (NM_{—}005732), LIG2 and sequences complementary thereto.

42. A method according to claim 39, wherein the amplification of the fragments of the chemically pretreated genomic DNA using a set of primer oligonucleotides and a polymerase is performed in a way that the amplificates carry a detectable label.

43. A method according to claim 39, wherein step b) further comprises the step of hybridizing the amplificates to a set of oligomers, wherein the base sequence of the oligomers includes at least one CpG dinucleotide.

44. A method according to claim 43, wherein the oligomers are oligonucleotides.

45. A method according to claim 43, wherein the oligomers are PNA probes.

46. A method according to claim 43, wherein the oligomers are in an array.

47. A method according to claim 43, wherein the cytosine of the CpG dinucleotide is located approximately in a middle third of each oligomer.

48. A method according to claim 43, wherein the set of oligomers comprises at least two different oligomers.

49. A method according to claim 43, wherein the set of oligomers comprises oligomers for detecting the methylation state of one or more CpG dinucleotides of one or more sequences taken from the group of Seq. ID No. 1 to Seq. ID No. 98 and sequences complementary thereto.

50. A method according to claim 43, wherein the set of oligomers comprises oligomers for detecting the methylation state of one or more CpG dinucleotides of a sequence selected from the group consisting of CENPB (X05299), DNA2L (D42046), ATR (NM_{—}001184), CHD1L (NM_{—}004284), ERCC3 (NM_{—}000122), SNRPA1 (NM_{—}003090), RAD50 (NM_{—}005732), LIG2 and sequences complementary thereto.

51. A method according to claim 39 wherein the chemical treatment is carried out using a bisulfite solution.

52. A method according to claim 39, wherein the fragments comprise more than ten different fragments having a length of 100-2000 base pairs.

53. A method according to claim 39, wherein the step of amplifying fragments of the chemically pretreated genomic DNA comprises amplification of more than one DNA segment in one reaction vessel.

54. A method according to claim 39, wherein the set of primer oligonucleotides comprises oligonucleotides having at least one base sequence having a length of at least 9 nucleotides which hybridizes to or is identical to a chemically pretreated DNA of sequences associated with DNA replication taken from the group of Seq. ID No. 1 to Seq. ID No. 98 and sequences complementary thereto.

55. A method according to claim 39, wherein the set of primer oligonucleotides comprises oligonucleotides having at least one base sequence having a length of at least 9 nucleotides which hybridizes to or is identical to a chemically pretreated DNA of genes associated with DNA replication selected from the group within at least one gene associated with DNA replication selected from the group consisting of CENPB (X05299), DNA2L (D42046), ATR (NM_{—}001184), CHD1L (NM_{—}004284), ERCC3 (NM_{—}000122), SNRPA1 (NM_{—}003090), RAD50 (NM_{—}005732), LIG2 and sequences complementary thereto.

56. A method according to claim 39, wherein the polymerase is a heat-resistant DNA polymerase.

57. A method according to claim 39, wherein the step of amplifying fragments of the chemically pretreated genomic DNA sequences using sets of primer oligonucleotides and a polymerase is carried out using a polymerase chain reaction (PCR).

58. A method according to claim 42, wherein the detectable label is selected from the group consisting of fluorescent labels, radionuclides and detachable molecule fragments having a predetermined mass detectable in a mass spectrometer.

59. A method according to claim 39, further comprising detecting amplificates or fragments of the amplificates in a mass spectrometer.

60. A method according to claim 42, wherein the produced fragments comprise a single positive or negative net charge.

61. A method according to claim 59, wherein the mass spectrometer uses matrix assisted laser desorption/ionization mass spectrometry (MALDI) or an electron spray mass spectrometry (ESI).

62. A method according to claim 39, wherein the genomic DNA is obtained from cells or cellular components which contain DNA.

63. A method according to claim 39, wherein the genomic DNA is obtained from a source selected from the group consisting of cell lines, biopsies, blood, sputum, stool, urine, cerebral-spinal fluid, tissue embedded in paraffin, intestine, kidney, brain, heart, prostate, lung, breast, liver, histologic object slides and combinations thereof.

64. A method according to claim 39, further comprising the step of diagnosing a disease associated with DNA replication.

65. A method according to claim 64, wherein the disease is selected from the group consisting of Ataxia telangiectasia, ATR-X, Bloom's syndrome, neurological disorders, solid tumours and cancer.

66. A method according to claim 39, further comprising the step of treating a disease associated with DNA replication.

67. A method according to claim 66, wherein the disease is selected from the group consisting of Ataxia telangiectasia, ATR-X, Bloom's syndrome, neurological disorders, solid tumours and cancer.

68. An oligomer comprising at least one base sequence having a length of at least 9 nucleotides which hybridizes to or is identical to a chemically pretreated DNA of sequences associated with DNA replication taken from the group of Seq. ID No. 1 to Seq. ID. No. 98 and complementary sequences thereto or according to one of the genes associated with DNA replication selected from the group consisting of CENPB (X05299), DNA2L (D42046), ATR (NM_{—}001184), CHD1L (NM_{—}004284), ERCC3 (NM_{—}000122), SNRPA1 (NM_{—}003090), RAD50 (NM_{—}005732), LIG2 and sequences complementary thereto.

69. An oligomer according to claim 68, wherein the oligomer is an oligonucleotide.

70. An oligomer according to claim 69, wherein the oligomer is a peptide nucleic acid (PNA)-oligomer.

71. An oligomer according to claim 68, wherein the base sequence includes at least one CpG dinucleotide.

72. An oligomer according to claim 68, wherein the cytosine of the CpG dinucleotide is located in about a middle third of the oligomer.

73. A set of oligomers comprising at least two oligomers, wherein each of the oligomers comprises at least one base sequence having a length of at least 9 nucleotides which hybridizes to or is identical to a chemically pretreated DNA of sequences associated with DNA replication taken from the group of Seq. ID No. 1 to Seq. ID. No. 98 and complementary sequences thereto or according to one of the genes associated with DNA replication selected from the group consisting of CENPB (X05299), DNA2L (D42046), ATR (NM_{—}001184), CHD1L (NM_{—}004284), ERCC3 (NM_{—}000122), SNRPA1 (NM_{—}003090), RAD50 (NM_{—}005732), LIG2 and sequences complementary thereto.

74. A set of oligomers according to claim 73, wherein the at least two oligomers comprise oligomers for detecting the methylation state of one or more CpG dinucleotides within at least one of the sequences according to Seq. ID Nos. 1 through 98 or according to at least one of the genes selected from the group consisting of CENPB (X05299), DNA2L (D42046), ATR (NM_{—}001184), CHD1L (NM_{—}004284), ERCC3 (NM_{—}000122), SNRPA1 (NM_{—}003090), RAD50 (NM_{—}005732), LIG2 and sequences complementary thereto.

75. A set of oligomers according to claim 73, wherein at least one oligonucleotide is bound to a solid phase.

76. A method for manufacturing an arrangement of different oligomers (array) for analyzing diseases associated with the methylation state of genes associated with regulation, comprising:
coupling at least two oligomers according to claim 68 to a solid phase.

77. A method according to claim 76, wherein the solid phase has a surface selected from the group consisting of silicon, glass, polystyrene, aluminum, steel, iron, copper, nickel, silver and gold.

78. An array of oligomers comprising two or more oligomers of claim 68.

79. A kit for diagnosis or prognosis of diseases related to DNA replication, comprising (a) a container comprising at least one oligomer according to claim 68 and (b) a bisulfite reagent.

80. A kit according to claim 79, further comprising standard methylation assay reagents for performing a methylation assay selected from the group consisting of MS-SNuPE, COBRA and combinations thereof.

81. A nucleic acid comprising a sequence at least 18 bases in length of a segment of chemically pretreated DNA of genes associated with DNA replication according to
